United States Patent Application Publication US 2016/0122760 A1 - sequence listing, part 2

SEQ ID NO: 34588 - DNA, 15 bp, Homo sapiens
ggggcccctcgggac

SEQ ID NO: 34589 - DNA, 15 bp, Homo sapiens
gggcccctcgggaca

SEQ ID NO: 34590 - DNA, 15 bp, Homo sapiens
ggcccctcgggacat

SEQ ID NO: 34591 - DNA, 15 bp, Homo sapiens
gcccctcgggacatg

SEQ ID NO: 34592 - DNA, 15 bp, Homo sapiens
cccctcgggacatgt

SEQ ID NO: 34593 - DNA, 15 bp, Homo sapiens
ccctcgggacatgtc

SEQ ID NO: 34594 - DNA, 15 bp, Homo sapiens
cctcgggacatgtcc

SEQ ID NO: 34595 - DNA, 15 bp, Homo sapiens
ctcgggacatgtccc

SEQ ID NO: 34596 - DNA, 15 bp, Homo sapiens
tcgggacatgtccca

SEQ ID NO: 34597 - DNA, 15 bp, Homo sapiens
cgggacatgtcccag

SEQ ID NO: 34598 - DNA, 15 bp, Homo sapiens
gggacatgtcccagc

SEQ ID NO: 34599 - DNA, 15 bp, Homo sapiens
ggacatgtcccagcc

SEQ ID NO: 34600 - DNA, 15 bp, Homo sapiens
gacatgtcccagcca

SEQ ID NO: 34601 - DNA, 15 bp, Homo sapiens
acatgtcccagccaa

SEQ ID NO: 34602 - DNA, 15 bp, Homo sapiens
catgtcccagccaat

SEQ ID NO: 34603 - DNA, 15 bp, Homo sapiens
atgtcccagccaatg

SEQ ID NO: 34604 - DNA, 15 bp, Homo sapiens
tgtcccagccaatgc

SEQ ID NO: 34605 - DNA, 15 bp, Homo sapiens
gtcccagccaatgcc

SEQ ID NO: 34606 - DNA, 15 bp, Homo sapiens
tcccagccaatgcct

SEQ ID NO: 34607 - DNA, 15 bp, Homo sapiens
cccagccaatgcctg

SEQ ID NO: 34608 - DNA, 15 bp, Homo sapiens
ccagccaatgcctgc

SEQ ID NO: 34609 - DNA, 15 bp, Homo sapiens
cagccaatgcctgct

SEQ ID NO: 34610 - DNA, 15 bp, Homo sapiens
agccaatgcctgctt

SEQ ID NO: 34611 - DNA, 15 bp, Homo sapiens
gccaatgcctgcttt

SEQ ID NO: 34612 - DNA, 15 bp, Homo sapiens
ccaatgcctgctttg

SEQ ID NO: 34613 - DNA, 15 bp, Homo sapiens
caatgcctgctttga

SEQ ID NO: 34614 - DNA, 15 bp, Homo sapiens
aatgcctgctttgac

SEQ ID NO: 34615 - DNA, 15 bp, Homo sapiens
atgcctgctttgacc

SEQ ID NO: 34616 - DNA, 15 bp, Homo sapiens
tgcctgctttgacca

SEQ ID NO: 34617 - DNA, 15 bp, Homo sapiens
gcctgctttgaccag

SEQ ID NO: 34618 - DNA, 15 bp, Homo sapiens
cctgctttgaccaga

SEQ ID NO: 34619 - DNA, 15 bp, Homo sapiens
ctgctttgaccagag

SEQ ID NO: 34620 - DNA, 15 bp, Homo sapiens
tgctttgaccagagg

SEQ ID NO: 34621 - DNA, 15 bp, Homo sapiens
gctttgaccagagga

SEQ ID NO: 34622 - DNA, 15 bp, Homo sapiens
ctttgaccagaggag

SEQ ID NO: 34623 - DNA, 15 bp, Homo sapiens
tttgaccagaggagt

SEQ ID NO: 34624 - DNA, 15 bp, Homo sapiens
ttgaccagaggagtg

SEQ ID NO: 34625 - DNA, 15 bp, Homo sapiens
tgaccagaggagtgt

SEQ ID NO: 34626 - DNA, 15 bp, Homo sapiens
gaccagaggagtgtc

SEQ ID NO: 34627 - DNA, 15 bp, Homo sapiens
accagaggagtgtcc

SEQ ID NO: 34628 - DNA, 15 bp, Homo sapiens
ccagaggagtgtcca

SEQ ID NO: 34629 - DNA, 15 bp, Homo sapiens
cagaggagtgtccac

SEQ ID NO: 34630 - DNA, 15 bp, Homo sapiens
agaggagtgtccacg

SEQ ID NO: 34631 - DNA, 15 bp, Homo sapiens
gaggagtgtccacgt

SEQ ID NO: 34632 - DNA, 15 bp, Homo sapiens
aggagtgtccacgtg

SEQ ID NO: 34633 - DNA, 15 bp, Homo sapiens
ggagtgtccacgtgg

SEQ ID NO: 34634 - DNA, 15 bp, Homo sapiens
gagtgtccacgtggc

SEQ ID NO: 34635 - DNA, 15 bp, Homo sapiens
agtgtccacgtggct

SEQ ID NO: 34636 - DNA, 15 bp, Homo sapiens
gtgtccacgtggctc

SEQ ID NO: 34637 - DNA, 15 bp, Homo sapiens
tgtccacgtggctca

SEQ ID NO: 34638 - DNA, 15 bp, Homo sapiens
gtccacgtggctcag

SEQ ID NO: 34639 - DNA, 15 bp, Homo sapiens
tccacgtggctcagg

SEQ ID NO: 34640 - DNA, 15 bp, Homo sapiens
ccacgtggctcaggt

SEQ ID NO: 34641 - DNA, 15 bp, Homo sapiens
cacgtggctcaggtg

SEQ ID NO: 34642 - DNA, 15 bp, Homo sapiens
acgtggctcaggtgg

SEQ ID NO: 34643 - DNA, 15 bp, Homo sapiens
cgtggctcaggtggt

SEQ ID NO: 34644 - DNA, 15 bp, Homo sapiens
gtggctcaggtggtc

SEQ ID NO: 34645 - DNA, 15 bp, Homo sapiens
tggctcaggtggtcg

SEQ ID NO: 34646 - DNA, 15 bp, Homo sapiens
ggctcaggtggtcga

SEQ ID NO: 34647 - DNA, 15 bp, Homo sapiens
gctcaggtggtcgag

SEQ ID NO: 34648 - DNA, 15 bp, Homo sapiens
ctcaggtggtcgagt

SEQ ID NO: 34649 - DNA, 15 bp, Homo sapiens
tcaggtggtcgagta

SEQ ID NO: 34650 - DNA, 15 bp, Homo sapiens
caggtggtcgagtat

SEQ ID NO: 34651 - DNA, 15 bp, Homo sapiens
aggtggtcgagtatc

SEQ ID NO: 34652 - DNA, 15 bp, Homo sapiens
ggtggtcgagtatct

SEQ ID NO: 34653 - DNA, 15 bp, Homo sapiens
gtggtcgagtatctc

SEQ ID NO: 34654 - DNA, 15 bp, Homo sapiens
tggtcgagtatctca

SEQ ID NO: 34655 - DNA, 15 bp, Homo sapiens
ggtcgagtatctcat

SEQ ID NO: 34656 - DNA, 15 bp, Homo sapiens
gtcgagtatctcata

SEQ ID NO: 34657 - DNA, 15 bp, Homo sapiens
tcgagtatctcatac

SEQ ID NO: 34658 - DNA, 15 bp, Homo sapiens
cgagtatctcatacc

SEQ ID NO: 34659 - DNA, 15 bp, Homo sapiens
gagtatctcataccg

SEQ ID NO: 34660 - DNA, 15 bp, Homo sapiens
agtatctcataccgc

SEQ ID NO: 34661 - DNA, 15 bp, Homo sapiens
gtatctcataccgcc

SEQ ID NO: 34662 - DNA, 15 bp, Homo sapiens
tatctcataccgccc

SEQ ID NO: 34663 - DNA, 15 bp, Homo sapiens
atctcataccgccct

SEQ ID NO: 34664 - DNA, 15 bp, Homo sapiens
tctcataccgcccta

SEQ ID NO: 34665 - DNA, 15 bp, Homo sapiens
ctcataccgccctag

SEQ ID NO: 34666 - DNA, 15 bp, Homo sapiens
tcataccgccctagc

SEQ ID NO: 34667 - DNA, 15 bp, Homo sapiens
cataccgccctagca

SEQ ID NO: 34668 - DNA, 15 bp, Homo sapiens
ataccgccctagcac

SEQ ID NO: 34669 - DNA, 15 bp, Homo sapiens
taccgccctagcaca

SEQ ID NO: 34670 - DNA, 15 bp, Homo sapiens
accgccctagcacac

SEQ ID NO: 34671 - DNA, 15 bp, Homo sapiens
ccgccctagcacacg

SEQ ID NO: 34672 - DNA, 15 bp, Homo sapiens
cgccctagcacacgt

SEQ ID NO: 34673 - DNA, 15 bp, Homo sapiens
gccctagcacacgtg

SEQ ID NO: 34674 - DNA, 15 bp, Homo sapiens
ccctagcacacgtgt

SEQ ID NO: 34675 - DNA, 15 bp, Homo sapiens
cctagcacacgtgtg

SEQ ID NO: 34676 - DNA, 15 bp, Homo sapiens
ctagcacacgtgtga

SEQ ID NO: 34677 - DNA, 15 bp, Homo sapiens
tagcacacgtgtgac

SEQ ID NO: 34678 - DNA, 15 bp, Homo sapiens
agcacacgtgtgact

SEQ ID NO: 34679 - DNA, 15 bp, Homo sapiens
gcacacgtgtgactc

SEQ ID NO: 34680 - DNA, 15 bp, Homo sapiens
cacacgtgtgactcc

SEQ ID NO: 34681 - DNA, 15 bp, Homo sapiens
acacgtgtgactcct

SEQ ID NO: 34682 - DNA, 15 bp, Homo sapiens
cacgtgtgactcctt

SEQ ID NO: 34683 - DNA, 15 bp, Homo sapiens
acgtgtgactccttt

SEQ ID NO: 34684 - DNA, 15 bp, Homo sapiens
cgtgtgactcctttc

SEQ ID NO: 34685 - DNA, 15 bp, Homo sapiens
gtgtgactcctttcc

SEQ ID NO: 34686 - DNA, 15 bp, Homo sapiens
tgtgactcctttccc

SEQ ID NO: 34687 - DNA, 15 bp, Homo sapiens
gtgactcctttcccc

SEQ ID NO: 34688 - DNA, 15 bp, Homo sapiens
tgactcctttcccct

SEQ ID NO: 34689 - DNA, 15 bp, Homo sapiens
gactcctttccccta

SEQ ID NO: 34690 - DNA, 15 bp, Homo sapiens
actcctttcccctat

SEQ ID NO: 34691 - DNA, 15 bp, Homo sapiens
ctcctttcccctatt

SEQ ID NO: 34692 - DNA, 15 bp, Homo sapiens
tcctttcccctattg

SEQ ID NO: 34693 - DNA, 15 bp, Homo sapiens
cctttcccctattgt

SEQ ID NO: 34694 - DNA, 15 bp, Homo sapiens
ctttcccctattgtc

SEQ ID NO: 34695 - DNA, 15 bp, Homo sapiens
tttcccctattgtct

SEQ ID NO: 34696 - DNA, 15 bp, Homo sapiens
ttcccctattgtcta

SEQ ID NO: 34697 - DNA, 15 bp, Homo sapiens
tcccctattgtctac

SEQ ID NO: 34698 - DNA, 15 bp, Homo sapiens
cccctattgtctacg

SEQ ID NO: 34699 - DNA, 15 bp, Homo sapiens
ccctattgtctacgc

SEQ ID NO: 34700 - DNA, 15 bp, Homo sapiens
cctattgtctacgca

SEQ ID NO: 34701 - DNA, 15 bp, Homo sapiens
ctattgtctacgcag

SEQ ID NO: 34702 - DNA, 15 bp, Homo sapiens
tattgtctacgcagc

SEQ ID NO: 34703 - DNA, 15 bp, Homo sapiens
attgtctacgcagcc

SEQ ID NO: 34704 - DNA, 15 bp, Homo sapiens
ttgtctacgcagcct

SEQ ID NO: 34705 - DNA, 15 bp, Homo sapiens
tgtctacgcagcctg

SEQ ID NO: 34706 - DNA, 15 bp, Homo sapiens
gtctacgcagcctgc

SEQ ID NO: 34707 - DNA, 15 bp, Homo sapiens
tctacgcagcctgcc

SEQ ID NO: 34708 - DNA, 15 bp, Homo sapiens
ctacgcagcctgccc

SEQ ID NO: 34709 - DNA, 15 bp, Homo sapiens
tacgcagcctgccct

SEQ ID NO: 34710 - DNA, 15 bp, Homo sapiens
acgcagcctgccctt

SEQ ID NO: 34711 - DNA, 15 bp, Homo sapiens
cgcagcctgcccttg

SEQ ID NO: 34712 - DNA, 15 bp, Homo sapiens
gcagcctgcccttgg

SEQ ID NO: 34713 - DNA, 15 bp, Homo sapiens
cagcctgcccttgga

SEQ ID NO: 34714 - DNA, 15 bp, Homo sapiens
agcctgcccttggac

SEQ ID NO: 34715 - DNA, 15 bp, Homo sapiens
gcctgcccttggaca

SEQ ID NO: 34716 - DNA, 15 bp, Homo sapiens
cctgcccttggacaa

SEQ ID NO: 34717 - DNA, 15 bp, Homo sapiens
ctgcccttggacaag

SEQ ID NO: 34718 - DNA, 15 bp, Homo sapiens
tgcccttggacaagg

SEQ ID NO: 34719 - DNA, 15 bp, Homo sapiens
gcccttggacaagga

SEQ ID NO: 34720 - DNA, 15 bp, Homo sapiens
cccttggacaaggac

SEQ ID NO: 34721 - DNA, 15 bp, Homo sapiens
ccttggacaaggacc

SEQ ID NO: 34722 - DNA, 15 bp, Homo sapiens
cttggacaaggaccc

SEQ ID NO: 34723 - DNA, 15 bp, Homo sapiens
ttggacaaggacccg

SEQ ID NO: 34724 - DNA, 15 bp, Homo sapiens
tggacaaggacccga

SEQ ID NO: 34725 - DNA, 15 bp, Homo sapiens
ggacaaggacccgat

SEQ ID NO: 34726 - DNA, 15 bp, Homo sapiens
gacaaggacccgatg

SEQ ID NO: 34727 - DNA, 15 bp, Homo sapiens
acaaggacccgatgc

SEQ ID NO: 34728 - DNA, 15 bp, Homo sapiens
caaggacccgatgcc

SEQ ID NO: 34729 - DNA, 15 bp, Homo sapiens
aaggacccgatgccc

SEQ ID NO: 34730 - DNA, 15 bp, Homo sapiens
aggacccgatgccca

SEQ ID NO: 34731 - DNA, 15 bp, Homo sapiens
ggacccgatgcccaa

SEQ ID NO: 34732 - DNA, 15 bp, Homo sapiens
gacccgatgcccaac

SEQ ID NO: 34733 - DNA, 15 bp, Homo sapiens
acccgatgcccaacc

SEQ ID NO: 34734 - DNA, 15 bp, Homo sapiens
cccgatgcccaaccc

SEQ ID NO: 34735 - DNA, 15 bp, Homo sapiens
ccgatgcccaacccc

SEQ ID NO: 34736 - DNA, 15 bp, Homo sapiens
cgatgcccaacccca

SEQ ID NO: 34737 - DNA, 15 bp, Homo sapiens
gatgcccaaccccag

SEQ ID NO: 34738 - DNA, 15 bp, Homo sapiens
atgcccaaccccagg

SEQ ID NO: 34739 - DNA, 15 bp, Homo sapiens
tgcccaaccccaggc

SEQ ID NO: 34740 - DNA, 15 bp, Homo sapiens
gcccaaccccaggcc

SEQ ID NO: 34741 - DNA, 15 bp, Homo sapiens
cccaaccccaggcct

SEQ ID NO: 34742 - DNA, 15 bp, Homo sapiens
ccaaccccaggcctg

SEQ ID NO: 34743 - DNA, 15 bp, Homo sapiens
caaccccaggcctgg

SEQ ID NO: 34744 - DNA, 15 bp, Homo sapiens
aaccccaggcctggc

SEQ ID NO: 34745 - DNA, 15 bp, Homo sapiens
accccaggcctggca

SEQ ID NO: 34746 - DNA, 15 bp, Homo sapiens
ccccaggcctggcaa

SEQ ID NO: 34747 - DNA, 15 bp, Homo sapiens
cccaggcctggcaag

SEQ ID NO: 34748 - DNA, 15 bp, Homo sapiens
ccaggcctggcaagc

SEQ ID NO: 34749 - DNA, 15 bp, Homo sapiens
caggcctggcaagcc

SEQ ID NO: 34750 - DNA, 15 bp, Homo sapiens
aggcctggcaagccc

SEQ ID NO: 34751 - DNA, 15 bp, Homo sapiens
ggcctggcaagccct

SEQ ID NO: 34752 - DNA, 15 bp, Homo sapiens
gcctggcaagccctc

SEQ ID NO: 34753 - DNA, 15 bp, Homo sapiens
cctggcaagccctcg

SEQ ID NO: 34754 - DNA, 15 bp, Homo sapiens
ctggcaagccctcgg

SEQ ID NO: 34755 - DNA, 15 bp, Homo sapiens
tggcaagccctcggc

SEQ ID NO: 34756 - DNA, 15 bp, Homo sapiens
ggcaagccctcggcc

SEQ ID NO: 34757 - DNA, 15 bp, Homo sapiens
gcaagccctcggccc

SEQ ID NO: 34758 - DNA, 15 bp, Homo sapiens
caagccctcggcccc

SEQ ID NO: 34759 - DNA, 15 bp, Homo sapiens
aagccctcggcccct

SEQ ID NO: 34760 - DNA, 15 bp, Homo sapiens
agccctcggcccctt

SEQ ID NO: 34761 - DNA, 15 bp, Homo sapiens
gccctcggccccttc

SEQ ID NO: 34762 - DNA, 15 bp, Homo sapiens
ccctcggccccttcc

SEQ ID NO: 34763 - DNA, 15 bp, Homo sapiens
cctcggccccttcct

SEQ ID NO: 34764 - DNA, 15 bp, Homo sapiens
ctcggccccttcctt

SEQ ID NO: 34765 - DNA, 15 bp, Homo sapiens
tcggccccttccttg

SEQ ID NO: 34766 - DNA, 15 bp, Homo sapiens
cggccccttccttgg

SEQ ID NO: 34767 - DNA, 15 bp, Homo sapiens
ggccccttccttggc

SEQ ID NO: 34768 - DNA, 15 bp, Homo sapiens
gccccttccttggcc

SEQ ID NO: 34769 - DNA, 15 bp, Homo sapiens
ccccttccttggccc

SEQ ID NO: 34770 - DNA, 15 bp, Homo sapiens
cccttccttggccct

SEQ ID NO: 34771 - DNA, 15 bp, Homo sapiens
ccttccttggccctt

SEQ ID NO: 34772 - DNA, 15 bp, Homo sapiens
cttccttggcccttg

SEQ ID NO: 34773 - DNA, 15 bp, Homo sapiens
ttccttggcccttgg

SEQ ID NO: 34774 - DNA, 15 bp, Homo sapiens
tccttggcccttggc

SEQ ID NO: 34775 - DNA, 15 bp, Homo sapiens
ccttggcccttggcc

SEQ ID NO: 34776 - DNA, 15 bp, Homo sapiens
cttggcccttggccc

SEQ ID NO: 34777 - DNA, 15 bp, Homo sapiens
ttggcccttggccca

SEQ ID NO: 34778 - DNA, 15 bp, Homo sapiens
tggcccttggcccat

SEQ ID NO: 34779 - DNA, 15 bp, Homo sapiens
ggcccttggcccatc

SEQ ID NO: 34780 - DNA, 15 bp, Homo sapiens
gcccttggcccatcc

SEQ ID NO: 34781 - DNA, 15 bp, Homo sapiens
cccttggcccatccc

SEQ ID NO: 34782 - DNA, 15 bp, Homo sapiens
ccttggcccatcccc

SEQ ID NO: 34783 - DNA, 15 bp, Homo sapiens
cttggcccatcccca

SEQ ID NO: 34784 - DNA, 15 bp, Homo sapiens
ttggcccatccccag

SEQ ID NO: 34785 - DNA, 15 bp, Homo sapiens
tggcccatccccagg

SEQ ID NO: 34786 - DNA, 15 bp, Homo sapiens
ggcccatccccagga

SEQ ID NO: 34787 - DNA, 15 bp, Homo sapiens
gcccatccccaggag

SEQ ID NO: 34788 - DNA, 15 bp, Homo sapiens
cccatccccaggagc

SEQ ID NO: 34789 - DNA, 15 bp, Homo sapiens
ccatccccaggagcc

SEQ ID NO: 34790 - DNA, 15 bp, Homo sapiens
catccccaggagcct

SEQ ID NO: 34791 - DNA, 15 bp, Homo sapiens
atccccaggagcctc

SEQ ID NO: 34792 - DNA, 15 bp, Homo sapiens
tccccaggagcctcg

SEQ ID NO: 34793 - DNA, 15 bp, Homo sapiens
ccccaggagcctcgc

SEQ ID NO: 34794 - DNA, 15 bp, Homo sapiens
cccaggagcctcgcc

SEQ ID NO: 34795 - DNA, 15 bp, Homo sapiens
ccaggagcctcgccc

SEQ ID NO: 34796 - DNA, 15 bp, Homo sapiens
caggagcctcgccca

SEQ ID NO: 34797 - DNA, 15 bp, Homo sapiens
aggagcctcgcccag

SEQ ID NO: 34798 - DNA, 15 bp, Homo sapiens
ggagcctcgcccagc

SEQ ID NO: 34799 - DNA, 15 bp, Homo sapiens
gagcctcgcccagct

SEQ ID NO: 34800 - DNA, 15 bp, Homo sapiens
agcctcgcccagctg

SEQ ID NO: 34801 - DNA, 15 bp, Homo sapiens
gcctcgcccagctgg

SEQ ID NO: 34802 - DNA, 15 bp, Homo sapiens
cctcgcccagctgga

SEQ ID NO: 34803 - DNA, 15 bp, Homo sapiens
ctcgcccagctggag

SEQ ID NO: 34804 - DNA, 15 bp, Homo sapiens
tcgcccagctggagg

SEQ ID NO: 34805 - DNA, 15 bp, Homo sapiens
cgcccagctggaggg

SEQ ID NO: 34806 - DNA, 15 bp, Homo sapiens
gcccagctggagggc

SEQ ID NO: 34807 - DNA, 15 bp, Homo sapiens
cccagctggagggct

SEQ ID NO: 34808 - DNA, 15 bp, Homo sapiens
ccagctggagggctg

SEQ ID NO: 34809 - DNA, 15 bp, Homo sapiens
cagctggagggctgc

SEQ ID NO: 34810 - DNA, 15 bp, Homo sapiens
agctggagggctgca

SEQ ID NO: 34811 - DNA, 15 bp, Homo sapiens
gctggagggctgcac

SEQ ID NO: 34812 - DNA, 15 bp, Homo sapiens
ctggagggctgcacc

SEQ ID NO: 34813 - DNA, 15 bp, Homo sapiens
tggagggctgcaccc

SEQ ID NO: 34814 - DNA, 15 bp, Homo sapiens
ggagggctgcaccca

SEQ ID NO: 34815 - DNA, 15 bp, Homo sapiens
gagggctgcacccaa

SEQ ID NO: 34816 - DNA, 15 bp, Homo sapiens
agggctgcacccaaa

SEQ ID NO: 34817 - DNA, 15 bp, Homo sapiens
gggctgcacccaaag

SEQ ID NO: 34818 - DNA, 15 bp, Homo sapiens
ggctgcacccaaagc

SEQ ID NO: 34819 - DNA, 15 bp, Homo sapiens
gctgcacccaaagcc

SEQ ID NO: 34820 - DNA, 15 bp, Homo sapiens
ctgcacccaaagcct

SEQ ID NO: 34821 - DNA, 15 bp, Homo sapiens
tgcacccaaagcctc

SEQ ID NO: 34822 - DNA, 15 bp, Homo sapiens
gcacccaaagcctca

SEQ ID NO: 34823 - DNA, 15 bp, Homo sapiens
cacccaaagcctcag

SEQ ID NO: 34824 - DNA, 15 bp, Homo sapiens
acccaaagcctcaga

SEQ ID NO: 34825 - DNA, 15 bp, Homo sapiens
cccaaagcctcagac

SEQ ID NO: 34826 - DNA, 15 bp, Homo sapiens
ccaaagcctcagacc

SEQ ID NO: 34827 - DNA, 15 bp, Homo sapiens
caaagcctcagacct

SEQ ID NO: 34828 - DNA, 15 bp, Homo sapiens
aaagcctcagacctg

SEQ ID NO: 34829 - DNA, 15 bp, Homo sapiens
aagcctcagacctgc

SEQ ID NO: 34830 - DNA, 15 bp, Homo sapiens
agcctcagacctgct

SEQ ID NO: 34831 - DNA, 15 bp, Homo sapiens
gcctcagacctgctg

SEQ ID NO: 34832 - DNA, 15 bp, Homo sapiens
cctcagacctgctgg

SEQ ID NO: 34833 - DNA, 15 bp, Homo sapiens
ctcagacctgctggg

SEQ ID NO: 34834 - DNA, 15 bp, Homo sapiens
tcagacctgctgggg

SEQ ID NO: 34835 - DNA, 15 bp, Homo sapiens
cagacctgctggggg

SEQ ID NO: 34836 - DNA, 15 bp, Homo sapiens
agacctgctgggggc

SEQ ID NO: 34837 - DNA, 15 bp, Homo sapiens
gacctgctgggggcc

SEQ ID NO: 34838 - DNA, 15 bp, Homo sapiens
acctgctgggggccc

SEQ ID NO: 34839 - DNA, 15 bp, Homo sapiens
cctgctgggggcccg

SEQ ID NO: 34840 - DNA, 15 bp, Homo sapiens
ctgctgggggcccgg

SEQ ID NO: 34841 - DNA, 15 bp, Homo sapiens
tgctgggggcccggg

SEQ ID NO: 34842 - DNA, 15 bp, Homo sapiens
gctgggggcccgggg

SEQ ID NO: 34843 - DNA, 15 bp, Homo sapiens
ctgggggcccggggc

SEQ ID NO: 34844 - DNA, 15 bp, Homo sapiens
tgggggcccggggcc

SEQ ID NO: 34845 - DNA, 15 bp, Homo sapiens
gggggcccggggccc

SEQ ID NO: 34846 - DNA, 15 bp, Homo sapiens
ggggcccggggccca

SEQ ID NO: 34847 - DNA, 15 bp, Homo sapiens
gggcccggggcccag

SEQ ID NO: 34848 - DNA, 15 bp, Homo sapiens
ggcccggggcccagg

SEQ ID NO: 34849 - DNA, 15 bp, Homo sapiens
gcccggggcccaggg

SEQ ID NO: 34850 - DNA, 15 bp, Homo sapiens
cccggggcccagggg

SEQ ID NO: 34851 - DNA, 15 bp, Homo sapiens
ccggggcccaggggg

SEQ ID NO: 34852 - DNA, 15 bp, Homo sapiens
cggggcccaggggga

SEQ ID NO: 34853 - DNA, 15 bp, Homo sapiens
ggggcccagggggaa

SEQ ID NO: 34854 - DNA, 15 bp, Homo sapiens
gggcccagggggaac

SEQ ID NO: 34855 - DNA, 15 bp, Homo sapiens
ggcccagggggaacc

SEQ ID NO: 34856 - DNA, 15 bp, Homo sapiens
gcccagggggaacct

SEQ ID NO: 34857 - DNA, 15 bp, Homo sapiens
cccagggggaacctt

SEQ ID NO: 34858 - DNA, 15 bp, Homo sapiens
ccagggggaaccttc

SEQ ID NO: 34859 - DNA, 15 bp, Homo sapiens
cagggggaaccttcc

SEQ ID NO: 34860 - DNA, 15 bp, Homo sapiens
agggggaaccttcca

SEQ ID NO: 34861 - DNA, 15 bp, Homo sapiens
gggggaaccttccag

SEQ ID NO: 34862 - DNA, 15 bp, Homo sapiens
ggggaaccttccagg

SEQ ID NO: 34863 - DNA, 15 bp, Homo sapiens
gggaaccttccaggg

SEQ ID NO: 34864 - DNA, 15 bp, Homo sapiens
ggaaccttccagggc

SEQ ID NO: 34865 - DNA, 15 bp, Homo sapiens
gaaccttccagggcc

SEQ ID NO: 34866 - DNA, 15 bp, Homo sapiens
aaccttccagggccg

SEQ ID NO: 34867 - DNA, 15 bp, Homo sapiens
accttccagggccga

SEQ ID NO: 34868 - DNA, 15 bp, Homo sapiens
ccttccagggccgag

SEQ ID NO: 34869 - DNA, 15 bp, Homo sapiens
cttccagggccgaga

SEQ ID NO: 34870 - DNA, 15 bp, Homo sapiens
ttccagggccgagat

SEQ ID NO: 34871 - DNA, 15 bp, Homo sapiens
tccagggccgagatc

SEQ ID NO: 34872 - DNA, 15 bp, Homo sapiens
ccagggccgagatct

SEQ ID NO: 34873 - DNA, 15 bp, Homo sapiens
cagggccgagatctt

SEQ ID NO: 34874 - DNA, 15 bp, Homo sapiens
agggccgagatcttc

SEQ ID NO: 34875 - DNA, 15 bp, Homo sapiens
gggccgagatcttcg

SEQ ID NO: 34876 - DNA, 15 bp, Homo sapiens
ggccgagatcttcga

SEQ ID NO: 34877 - DNA, 15 bp, Homo sapiens
gccgagatcttcgag

SEQ ID NO: 34878 - DNA, 15 bp, Homo sapiens
ccgagatcttcgagg

SEQ ID NO: 34879 - DNA, 15 bp, Homo sapiens
cgagatcttcgaggc

SEQ ID NO: 34880 - DNA, 15 bp, Homo sapiens
gagatcttcgaggcg

SEQ ID NO: 34881 - DNA, 15 bp, Homo sapiens
agatcttcgaggcgg

SEQ ID NO: 34882 - DNA, 15 bp, Homo sapiens
gatcttcgaggcggg

SEQ ID NO: 34883 - DNA, 15 bp, Homo sapiens
atcttcgaggcgggg

SEQ ID NO: 34884 - DNA, 15 bp, Homo sapiens
tcttcgaggcggggc

SEQ ID NO: 34885 - DNA, 15 bp, Homo sapiens
cttcgaggcggggcc

SEQ ID NO: 34886 - DNA, 15 bp, Homo sapiens
ttcgaggcggggccc

SEQ ID NO: 34887 - DNA, 15 bp, Homo sapiens
tcgaggcggggccca

SEQ ID NO: 34888 - DNA, 15 bp, Homo sapiens
cgaggcggggcccat

SEQ ID NO: 34889 - DNA, 15 bp, Homo sapiens
gaggcggggcccatg

SEQ ID NO: 34890 - DNA, 15 bp, Homo sapiens
aggcggggcccatgc

SEQ ID NO: 34891 - DNA, 15 bp, Homo sapiens
ggcggggcccatgcc

SEQ ID NO: 34892 - DNA, 15 bp, Homo sapiens
gcggggcccatgcct

SEQ ID NO: 34893 - DNA, 15 bp, Homo sapiens
cggggcccatgcctc

SEQ ID NO: 34894 - DNA, 15 bp, Homo sapiens
ggggcccatgcctcc

SEQ ID NO: 34895 - DNA, 15 bp, Homo sapiens
gggcccatgcctcct

SEQ ID NO: 34896 - DNA, 15 bp, Homo sapiens
ggcccatgcctcctc

SEQ ID NO: 34897 - DNA, 15 bp, Homo sapiens
gcccatgcctcctct

SEQ ID NO: 34898 - DNA, 15 bp, Homo sapiens
cccatgcctcctctt

SEQ ID NO: 34899 - DNA, 15 bp, Homo sapiens
ccatgcctcctcttc

SEQ ID NO: 34900 - DNA, 15 bp, Homo sapiens
catgcctcctcttct

SEQ ID NO: 34901 - DNA, 15 bp, Homo sapiens
atgcctcctcttctt

SEQ ID NO: 34902 - DNA, 15 bp, Homo sapiens
tgcctcctcttcttc

SEQ ID NO: 34903 - DNA, 15 bp, Homo sapiens
gcctcctcttcttcc

SEQ ID NO: 34904 - DNA, 15 bp, Homo sapiens
cctcctcttcttcct

SEQ ID NO: 34905 - DNA, 15 bp, Homo sapiens
ctcctcttcttcctt

SEQ ID NO: 34906 - DNA, 15 bp, Homo sapiens
tcctcttcttccttg

SEQ ID NO: 34907 - DNA, 15 bp, Homo sapiens
cctcttcttccttga

SEQ ID NO: 34908 - DNA, 15 bp, Homo sapiens
ctcttcttccttgaa

SEQ ID NO: 34909 - DNA, 15 bp, Homo sapiens
tcttcttccttgaac

SEQ ID NO: 34910 - DNA, 15 bp, Homo sapiens
cttcttccttgaacc

SEQ ID NO: 34911 - DNA, 15 bp, Homo sapiens
ttcttccttgaaccc

SEQ ID NO: 34912 - DNA, 15 bp, Homo sapiens
tcttccttgaacccc

SEQ ID NO: 34913 - DNA, 15 bp, Homo sapiens
cttccttgaacccca

SEQ ID NO: 34914 - DNA, 15 bp, Homo sapiens
ttccttgaaccccat

SEQ ID NO: 34915 - DNA, 15 bp, Homo sapiens
tccttgaaccccatg

SEQ ID NO: 34916 - DNA, 15 bp, Homo sapiens
ccttgaaccccatgc

SEQ ID NO: 34917 - DNA, 15 bp, Homo sapiens
cttgaaccccatgcc

SEQ ID NO: 34918 - DNA, 15 bp, Homo sapiens
ttgaaccccatgcca

SEQ ID NO: 34919 - DNA, 15 bp, Homo sapiens
tgaaccccatgccac

SEQ ID NO: 34920 - DNA, 15 bp, Homo sapiens
gaaccccatgccacc

SEQ ID NO: 34921 - DNA, 15 bp, Homo sapiens
aaccccatgccacca

SEQ ID NO: 34922 - DNA, 15 bp, Homo sapiens
accccatgccaccat

SEQ ID NO: 34923 - DNA, 15 bp, Homo sapiens
ccccatgccaccatc

SEQ ID NO: 34924 - DNA, 15 bp, Homo sapiens
cccatgccaccatcg

SEQ ID NO: 34925 - DNA, 15 bp, Homo sapiens
ccatgccaccatcgc

SEQ ID NO: 34926 - DNA, 15 bp, Homo sapiens
catgccaccatcgca

SEQ ID NO: 34927 - DNA, 15 bp, Homo sapiens
atgccaccatcgcag

SEQ ID NO: 34928 - DNA, 15 bp, Homo sapiens
tgccaccatcgcagc

SEQ ID NO: 34929 - DNA, 15 bp, Homo sapiens
gccaccatcgcagct

SEQ ID NO: 34930 - DNA, 15 bp, Homo sapiens
ccaccatcgcagctg

SEQ ID NO: 34931 - DNA, 15 bp, Homo sapiens
caccatcgcagctgc

SEQ ID NO: 34932 - DNA, 15 bp, Homo sapiens
accatcgcagctgca

SEQ ID NO: 34933 - DNA, 15 bp, Homo sapiens
ccatcgcagctgcag

SEQ ID NO: 34934 - DNA, 15 bp, Homo sapiens
catcgcagctgcagg

SEQ ID NO: 34935 - DNA, 15 bp, Homo sapiens
atcgcagctgcaggt

SEQ ID NO: 34936 - DNA, 15 bp, Homo sapiens
tcgcagctgcaggtg

SEQ ID NO: 34937 - DNA, 15 bp, Homo sapiens
cgcagctgcaggtga

SEQ ID NO: 34938 - DNA, 15 bp, Homo sapiens
gcagctgcaggtgag

SEQ ID NO: 34939 - DNA, 15 bp, Homo sapiens
cagctgcaggtgagg

SEQ ID NO: 34940 - DNA, 15 bp, Homo sapiens
agctgcaggtgaggc

SEQ ID NO: 34941 - DNA, 15 bp, Homo sapiens
gctgcaggtgaggcc

SEQ ID NO: 34942 - DNA, 15 bp, Homo sapiens
ctgcaggtgaggccc

SEQ ID NO: 34943 - DNA, 15 bp, Homo sapiens
tgcaggtgaggccct

SEQ ID NO: 34944 - DNA, 15 bp, Homo sapiens
gcaggtgaggccctg

SEQ ID NO: 34945 - DNA, 15 bp, Homo sapiens
caggtgaggccctgg

SEQ ID NO: 34946 - DNA, 15 bp, Homo sapiens
aggtgaggccctggg

SEQ ID NO: 34947 - DNA, 15 bp, Homo sapiens
ggtgaggccctgggc

SEQ ID NO: 34948 - DNA, 15 bp, Homo sapiens
gtgaggccctgggcc

SEQ ID NO: 34949 - DNA, 15 bp, Homo sapiens
tgaggccctgggccc

SEQ ID NO: 34950 - DNA, 15 bp, Homo sapiens
gaggccctgggccca

SEQ ID NO: 34951 - DNA, 15 bp, Homo sapiens
aggccctgggcccag

SEQ ID NO: 34952 - DNA, 15 bp, Homo sapiens
ggccctgggcccagg

SEQ ID NO: 34953 - DNA, 15 bp, Homo sapiens
gccctgggcccagga

SEQ ID NO: 34954 - DNA, 15 bp, Homo sapiens
ccctgggcccaggat

SEQ ID NO: 34955 - DNA, 15 bp, Homo sapiens
cctgggcccaggatg

SEQ ID NO: 34956 - DNA, 15 bp, Homo sapiens
ctgggcccaggatgg

SEQ ID NO: 34957 - DNA, 15 bp, Homo sapiens
tgggcccaggatggg

SEQ ID NO: 34958 - DNA, 15 bp, Homo sapiens
gggcccaggatgggg

SEQ ID NO: 34959 - DNA, 15 bp, Homo sapiens
ggcccaggatggggc

SEQ ID NO: 34960 - DNA, 15 bp, Homo sapiens
gcccaggatggggca

SEQ ID NO: 34961 - DNA, 15 bp, Homo sapiens
cccaggatggggcag

SEQ ID NO: 34962 - DNA, 15 bp, Homo sapiens
ccaggatggggcagg

SEQ ID NO: 34963 - DNA, 15 bp, Homo sapiens
caggatggggcaggc

SEQ ID NO: 34964 - DNA, 15 bp, Homo sapiens
aggatggggcaggca

SEQ ID NO: 34965 - DNA, 15 bp, Homo sapiens
ggatggggcaggcag

SEQ ID NO: 34966 - DNA, 15 bp, Homo sapiens
gatggggcaggcagg

SEQ ID NO: 34967 - DNA, 15 bp, Homo sapiens
atggggcaggcaggg

SEQ ID NO: 34968 - DNA, 15 bp, Homo sapiens
tggggcaggcagggt

SEQ ID NO: 34969 - DNA, 15 bp, Homo sapiens
ggggcaggcagggtg

SEQ ID NO: 34970 - DNA, 15 bp, Homo sapiens
gggcaggcagggtgg

SEQ ID NO: 34971 - DNA, 15 bp, Homo sapiens
ggcaggcagggtggg

SEQ ID NO: 34972 - DNA, 15 bp, Homo sapiens
gcaggcagggtgggg

SEQ ID NO: 34973 - DNA, 15 bp, Homo sapiens
caggcagggtggggt

SEQ ID NO: 34974 - DNA, 15 bp, Homo sapiens
aggcagggtggggta

SEQ ID NO: 34975 - DNA, 15 bp, Homo sapiens
ggcagggtggggtac

SEQ ID NO: 34976 - DNA, 15 bp, Homo sapiens
gcagggtggggtacc

SEQ ID NO: 34977 - DNA, 15 bp, Homo sapiens
cagggtggggtacct

SEQ ID NO: 34978 - DNA, 15 bp, Homo sapiens
agggtggggtacctg

SEQ ID NO: 34979 - DNA, 15 bp, Homo sapiens
gggtggggtacctgg

SEQ ID NO: 34980 - DNA, 15 bp, Homo sapiens
ggtggggtacctgga

SEQ ID NO: 34981 - DNA, 15 bp, Homo sapiens
gtggggtacctggac

SEQ ID NO: 34982 - DNA, 15 bp, Homo sapiens
tggggtacctggacc

SEQ ID NO: 34983 - DNA, 15 bp, Homo sapiens
ggggtacctggacct

SEQ ID NO: 34984 - DNA, 15 bp, Homo sapiens
gggtacctggaccta

SEQ ID NO: 34985 - DNA, 15 bp, Homo sapiens
ggtacctggacctac

SEQ ID NO: 34986 - DNA, 15 bp, Homo sapiens
gtacctggacctaca

SEQ ID NO: 34987 - DNA, 15 bp, Homo sapiens
tacctggacctacag

SEQ ID NO: 34988 - DNA, 15 bp, Homo sapiens
acctggacctacagg

SEQ ID NO: 34989 - DNA, 15 bp, Homo sapiens
cctggacctacaggt

SEQ ID NO: 34990 - DNA, 15 bp, Homo sapiens
ctggacctacaggtg

SEQ ID NO: 34991 - DNA, 15 bp, Homo sapiens
tggacctacaggtgc

SEQ ID NO: 34992 - DNA, 15 bp, Homo sapiens
ggacctacaggtgcc

SEQ ID NO: 34993 - DNA, 15 bp, Homo sapiens
gacctacaggtgccg

SEQ ID NO: 34994 - DNA, 15 bp, Homo sapiens
acctacaggtgccga

SEQ ID NO: 34995 - DNA, 15 bp, Homo sapiens
cctacaggtgccgac

SEQ ID NO: 34996 - DNA, 15 bp, Homo sapiens
ctacaggtgccgacc

SEQ ID NO: 34997 - DNA, 15 bp, Homo sapiens
tacaggtgccgacct

SEQ ID NO: 34998 - DNA, 15 bp, Homo sapiens
acaggtgccgacctt

SEQ ID NO: 34999 - DNA, 15 bp, Homo sapiens
caggtgccgaccttt

SEQ ID NO: 35000 - DNA, 15 bp, Homo sapiens
aggtgccgaccttta

SEQ ID NO: 35001 - DNA, 15 bp, Homo sapiens
ggtgccgacctttac

SEQ ID NO: 35002 - DNA, 15 bp, Homo sapiens
gtgccgacctttact

SEQ ID NO: 35003 - DNA, 15 bp, Homo sapiens
tgccgacctttactg

SEQ ID NO: 35004 - DNA, 15 bp, Homo sapiens
gccgacctttactgt

SEQ ID NO: 35005 - DNA, 15 bp, Homo sapiens
ccgacctttactgtg

SEQ ID NO: 35006 - DNA, 15 bp, Homo sapiens
cgacctttactgtgg

SEQ ID NO: 35007 - DNA, 15 bp, Homo sapiens
gacctttactgtggc

SEQ ID NO: 35008 - DNA, 15 bp, Homo sapiens
acctttactgtggca

SEQ ID NO: 35009 - DNA, 15 bp, Homo sapiens
cctttactgtggcac

SEQ ID NO: 35010 - DNA, 15 bp, Homo sapiens
ctttactgtggcact

SEQ ID NO: 35011 - DNA, 15 bp, Homo sapiens
tttactgtggcactg

SEQ ID NO: 35012 - DNA, 15 bp, Homo sapiens
ttactgtggcactgg

SEQ ID NO: 35013 - DNA, 15 bp, Homo sapiens
tactgtggcactggg

SEQ ID NO: 35014 - DNA, 15 bp, Homo sapiens
actgtggcactgggc

SEQ ID NO: 35015 - DNA, 15 bp, Homo sapiens
ctgtggcactgggcg

SEQ ID NO: 35016 - DNA, 15 bp, Homo sapiens
tgtggcactgggcgg

SEQ ID NO: 35017 - DNA, 15 bp, Homo sapiens
gtggcactgggcggg

SEQ ID NO: 35018 - DNA, 15 bp, Homo sapiens
tggcactgggcggga

SEQ ID NO: 35019 - DNA, 15 bp, Homo sapiens
ggcactgggcgggag

SEQ ID NO: 35020 - DNA, 15 bp, Homo sapiens
gcactgggcgggagg

SEQ ID NO: 35021 - DNA, 15 bp, Homo sapiens
cactgggcgggaggg

SEQ ID NO: 35022 - DNA, 15 bp, Homo sapiens
actgggcgggagggg

SEQ ID NO: 35023 - DNA, 15 bp, Homo sapiens
ctgggcgggaggggg

SEQ ID NO: 35024 - DNA, 15 bp, Homo sapiens
tgggcgggagggggg

SEQ ID NO: 35025 - DNA, 15 bp, Homo sapiens
gggcgggaggggggc

SEQ ID NO: 35026 - DNA, 15 bp, Homo sapiens
ggcgggaggggggct

SEQ ID NO: 35027 - DNA, 15 bp, Homo sapiens
gcgggaggggggctg

SEQ ID NO: 35028 - DNA, 15 bp, Homo sapiens
cgggaggggggctgg

SEQ ID NO: 35029 - DNA, 15 bp, Homo sapiens
gggaggggggctggc

SEQ ID NO: 35030 - DNA, 15 bp, Homo sapiens
ggaggggggctggct

SEQ ID NO: 35031 - DNA, 15 bp, Homo sapiens
gaggggggctggctg

SEQ ID NO: 35032 - DNA, 15 bp, Homo sapiens
aggggggctggctgg

SEQ ID NO: 35033 - DNA, 15 bp, Homo sapiens
ggggggctggctggg

SEQ ID NO: 35034 - DNA, 15 bp, Homo sapiens
gggggctggctgggg

SEQ ID NO: 35035 - DNA, 15 bp, Homo sapiens
ggggctggctggggc

SEQ ID NO: 35036 - DNA, 15 bp, Homo sapiens
gggctggctggggca

SEQ ID NO: 35037 - DNA, 15 bp, Homo sapiens
ggctggctggggcac

SEQ ID NO: 35038 - DNA, 15 bp, Homo sapiens
gctggctggggcaca

SEQ ID NO: 35039 - DNA, 15 bp, Homo sapiens
ctggctggggcacag

SEQ ID NO: 35040 - DNA, 15 bp, Homo sapiens
tggctggggcacagg

SEQ ID NO: 35041 - DNA, 15 bp, Homo sapiens
ggctggggcacagga

SEQ ID NO: 35042 - DNA, 15 bp, Homo sapiens
gctggggcacaggaa

SEQ ID NO: 35043 - DNA, 15 bp, Homo sapiens
ctggggcacaggaag

SEQ ID NO: 35044 - DNA, 15 bp, Homo sapiens
tggggcacaggaagt

SEQ ID NO: 35045 - DNA, 15 bp, Homo sapiens
ggggcacaggaagtg

SEQ ID NO: 35046 - DNA, 15 bp, Homo sapiens
gggcacaggaagtgg

SEQ ID NO: 35047 - DNA, 15 bp, Homo sapiens
ggcacaggaagtggt

SEQ ID NO: 35048 - DNA, 15 bp, Homo sapiens
gcacaggaagtggtt

SEQ ID NO: 35049 - DNA, 15 bp, Homo sapiens
cacaggaagtggttt

SEQ ID NO: 35050 - DNA, 15 bp, Homo sapiens
acaggaagtggtttc

SEQ ID NO: 35051 - DNA, 15 bp, Homo sapiens
caggaagtggtttct

SEQ ID NO: 35052 - DNA, 15 bp, Homo sapiens
aggaagtggtttctg

SEQ ID NO: 35053 - DNA, 15 bp, Homo sapiens
ggaagtggtttctgg

SEQ ID NO: 35054 - DNA, 15 bp, Homo sapiens
gaagtggtttctggg

SEQ ID NO: 35055 - DNA, 15 bp, Homo sapiens
aagtggtttctgggt

SEQ ID NO: 35056 - DNA, 15 bp, Homo sapiens
agtggtttctgggtc

SEQ ID NO: 35057 - DNA, 15 bp, Homo sapiens
gtggtttctgggtcc

SEQ ID NO: 35058 - DNA, 15 bp, Homo sapiens
tggtttctgggtccc

SEQ ID NO: 35059 - DNA, 15 bp, Homo sapiens
ggtttctgggtccca

SEQ ID NO: 35060 - DNA, 15 bp, Homo sapiens
gtttctgggtcccag

SEQ ID NO: 35061 - DNA, 15 bp, Homo sapiens
tttctgggtcccagg

SEQ ID NO: 35062 - DNA, 15 bp, Homo sapiens
ttctgggtcccaggc

SEQ ID NO: 35063 - DNA, 15 bp, Homo sapiens
tctgggtcccaggca

SEQ ID NO: 35064 - DNA, 15 bp, Homo sapiens
ctgggtcccaggcaa

SEQ ID NO: 35065 - DNA, 15 bp, Homo sapiens
tgggtcccaggcaag

SEQ ID NO: 35066 - DNA, 15 bp, Homo sapiens
gggtcccaggcaagt

SEQ ID NO: 35067 - DNA, 15 bp, Homo sapiens
ggtcccaggcaagtc

SEQ ID NO: 35068 - DNA, 15 bp, Homo sapiens
gtcccaggcaagtct

SEQ ID NO: 35069 - DNA, 15 bp, Homo sapiens
tcccaggcaagtctg

SEQ ID NO: 35070 - DNA, 15 bp, Homo sapiens
cccaggcaagtctgt

SEQ ID NO: 35071 - DNA, 15 bp, Homo sapiens
ccaggcaagtctgtg

SEQ ID NO: 35072 - DNA, 15 bp, Homo sapiens
caggcaagtctgtga

SEQ ID NO: 35073 - DNA, 15 bp, Homo sapiens
aggcaagtctgtgac

SEQ ID NO: 35074 - DNA, 15 bp, Homo sapiens
ggcaagtctgtgact

SEQ ID NO: 35075 - DNA, 15 bp, Homo sapiens
gcaagtctgtgactt

SEQ ID NO: 35076 - DNA, 15 bp, Homo sapiens
caagtctgtgactta

SEQ ID NO: 35077 - DNA, 15 bp, Homo sapiens
aagtctgtgacttat

SEQ ID NO: 35078 - DNA, 15 bp, Homo sapiens
agtctgtgacttatg

SEQ ID NO: 35079 - DNA, 15 bp, Homo sapiens
gtctgtgacttatgc

SEQ ID NO: 35080 - DNA, 15 bp, Homo sapiens
tctgtgacttatgca

SEQ ID NO: 35081 - DNA, 15 bp, Homo sapiens
ctgtgacttatgcag

SEQ ID NO: 35082 - DNA, 15 bp, Homo sapiens
tgtgacttatgcaga

SEQ ID NO: 35083 - DNA, 15 bp, Homo sapiens
gtgacttatgcagat

SEQ ID NO: 35084 - DNA, 15 bp, Homo sapiens
tgacttatgcagatg

SEQ ID NO: 35085 - DNA, 15 bp, Homo sapiens
gacttatgcagatgt

SEQ ID NO: 35086 - DNA, 15 bp, Homo sapiens
acttatgcagatgtt

SEQ ID NO: 35087 - DNA, 15 bp, Homo sapiens
cttatgcagatgttg

SEQ ID NO: 35088 - DNA, 15 bp, Homo sapiens
ttatgcagatgttgc

SEQ ID NO: 35089 - DNA, 15 bp, Homo sapiens
tatgcagatgttgca

SEQ ID NO: 35090 - DNA, 15 bp, Homo sapiens
atgcagatgttgcag

SEQ ID NO: 35091 - DNA, 15 bp, Homo sapiens
tgcagatgttgcagg

SEQ ID NO: 35092 - DNA, 15 bp, Homo sapiens
gcagatgttgcaggg

SEQ ID NO: 35093 - DNA, 15 bp, Homo sapiens
cagatgttgcagggc

SEQ ID NO: 35094 - DNA, 15 bp, Homo sapiens
agatgttgcagggcc

SEQ ID NO: 35095 - DNA, 15 bp, Homo sapiens
gatgttgcagggcca

SEQ ID NO: 35096 - DNA, 15 bp, Homo sapiens
atgttgcagggccaa

SEQ ID NO: 35097 - DNA, 15 bp, Homo sapiens
tgttgcagggccaag

SEQ ID NO: 35098 - DNA, 15 bp, Homo sapiens
gttgcagggccaaga

SEQ ID NO: 35099 - DNA, 15 bp, Homo sapiens
ttgcagggccaagaa

SEQ ID NO: 35100 - DNA, 15 bp, Homo sapiens
tgcagggccaagaaa

SEQ ID NO: 35101 - DNA, 15 bp, Homo sapiens
gcagggccaagaaaa

SEQ ID NO: 35102 - DNA, 15 bp, Homo sapiens
cagggccaagaaaat

SEQ ID NO: 35103 - DNA, 15 bp, Homo sapiens
agggccaagaaaatc

SEQ ID NO: 35104 - DNA, 15 bp, Homo sapiens
gggccaagaaaatcc

SEQ ID NO: 35105 - DNA, 15 bp, Homo sapiens
ggccaagaaaatccc

SEQ ID NO: 35106 - DNA, 15 bp, Homo sapiens
gccaagaaaatcccc

SEQ ID NO: 35107 - DNA, 15 bp, Homo sapiens
ccaagaaaatcccca

SEQ ID NO: 35108 - DNA, 15 bp, Homo sapiens
caagaaaatccccac

SEQ ID NO: 35109 - DNA, 15 bp, Homo sapiens
aagaaaatccccacc

SEQ ID NO: 35110 - DNA, 15 bp, Homo sapiens
agaaaatccccacct

SEQ ID NO: 35111 - DNA, 15 bp, Homo sapiens
gaaaatccccacctg

SEQ ID NO: 35112 - DNA, 15 bp, Homo sapiens
aaaatccccacctgc

SEQ ID NO: 35113 - DNA, 15 bp, Homo sapiens
aaatccccacctgcc

SEQ ID NO: 35114 - DNA, 15 bp, Homo sapiens
aatccccacctgcca

SEQ ID NO: 35115 - DNA, 15 bp, Homo sapiens
atccccacctgccag

SEQ ID NO: 35116 - DNA, 15 bp, Homo sapiens
tccccacctgccagg

SEQ ID NO: 35117 - DNA, 15 bp, Homo sapiens
ccccacctgccaggc

SEQ ID NO: 35118 - DNA, 15 bp, Homo sapiens
cccacctgccaggcc

SEQ ID NO: 35119 - DNA, 15 bp, Homo sapiens
ccacctgccaggcct

SEQ ID NO: 35120 - DNA, 15 bp, Homo sapiens
cacctgccaggcctc

SEQ ID NO: 35121 - DNA, 15 bp, Homo sapiens
acctgccaggcctca

SEQ ID NO: 35122 - DNA, 15 bp, Homo sapiens
cctgccaggcctcag

SEQ ID NO: 35123 - DNA, 15 bp, Homo sapiens
ctgccaggcctcaga

SEQ ID NO: 35124 - DNA, 15 bp, Homo sapiens
tgccaggcctcagag

SEQ ID NO: 35125 - DNA, 15 bp, Homo sapiens
gccaggcctcagaga

SEQ ID NO: 35126 - DNA, 15 bp, Homo sapiens
ccaggcctcagagat

SEQ ID NO: 35127 - DNA, 15 bp, Homo sapiens
caggcctcagagatt

SEQ ID NO: 35128 - DNA, 15 bp, Homo sapiens
aggcctcagagattg

SEQ ID NO: 35129 - DNA, 15 bp, Homo sapiens
ggcctcagagattgg

SEQ ID NO: 35130 - DNA, 15 bp, Homo sapiens
gcctcagagattgga

SEQ ID NO: 35131 - DNA, 15 bp, Homo sapiens
cctcagagattggag

SEQ ID NO: 35132 - DNA, 15 bp, Homo sapiens
ctcagagattggagg

SEQ ID NO: 35133 - DNA, 15 bp, Homo sapiens
tcagagattggaggc

SEQ ID NO: 35134 - DNA, 15 bp, Homo sapiens
cagagattggaggct

SEQ ID NO: 35135 - DNA, 15 bp, Homo sapiens
agagattggaggctc

SEQ ID NO: 35136 - DNA, 15 bp, Homo sapiens
gagattggaggctct

SEQ ID NO: 35137 - DNA, 15 bp, Homo sapiens
agattggaggctctc

SEQ ID NO: 35138 - DNA, 15 bp, Homo sapiens
gattggaggctctcc

SEQ ID NO: 35139 - DNA, 15 bp, Homo sapiens
attggaggctctccc

SEQ ID NO: 35140 - DNA, 15 bp, Homo sapiens
ttggaggctctcccc

SEQ ID NO: 35141 - DNA, 15 bp, Homo sapiens
tggaggctctccccg

SEQ ID NO: 35142 - DNA, 15 bp, Homo sapiens
ggaggctctccccga

SEQ ID NO: 35143 - DNA, 15 bp, Homo sapiens
gaggctctccccgac

SEQ ID NO: 35144 - DNA, 15 bp, Homo sapiens
aggctctccccgacc

SEQ ID NO: 35145 - DNA, 15 bp, Homo sapiens
ggctctccccgacct

SEQ ID NO: 35146 - DNA, 15 bp, Homo sapiens
gctctccccgacctc

SEQ ID NO: 35147 - DNA, 15 bp, Homo sapiens
ctctccccgacctcc

SEQ ID NO: 35148 - DNA, 15 bp, Homo sapiens
tctccccgacctccc

SEQ ID NO: 35149 - DNA, 15 bp, Homo sapiens
ctccccgacctccca

SEQ ID NO: 35150 - DNA, 15 bp, Homo sapiens
tccccgacctcccaa

SEQ ID NO: 35151 - DNA, 15 bp, Homo sapiens
ccccgacctcccaat

SEQ ID NO: 35152 - DNA, 15 bp, Homo sapiens
cccgacctcccaatc

SEQ ID NO: 35153 - DNA, 15 bp, Homo sapiens
ccgacctcccaatcc

SEQ ID NO: 35154 - DNA, 15 bp, Homo sapiens
cgacctcccaatccc

SEQ ID NO: 35155 - DNA, 15 bp, Homo sapiens
gacctcccaatccct

SEQ ID NO: 35156 - DNA, 15 bp, Homo sapiens
acctcccaatccctg

SEQ ID NO: 35157 - DNA, 15 bp, Homo sapiens
cctcccaatccctgt

SEQ ID NO: 35158 - DNA, 15 bp, Homo sapiens
ctcccaatccctgtc

SEQ ID NO: 35159 - DNA, 15 bp, Homo sapiens
tcccaatccctgtct

SEQ ID NO: 35160 - DNA, 15 bp, Homo sapiens
cccaatccctgtctc

SEQ ID NO: 35161 - DNA, 15 bp, Homo sapiens
ccaatccctgtctca

SEQ ID NO: 35162 - DNA, 15 bp, Homo sapiens
caatccctgtctcag

SEQ ID NO: 35163 - DNA, 15 bp, Homo sapiens
aatccctgtctcagg

SEQ ID NO: 35164 - DNA, 15 bp, Homo sapiens
atccctgtctcagga

SEQ ID NO: 35165 - DNA, 15 bp, Homo sapiens
tccctgtctcaggag

SEQ ID NO: 35166 - DNA, 15 bp, Homo sapiens
ccctgtctcaggaga

SEQ ID NO: 35167 - DNA, 15 bp, Homo sapiens
cctgtctcaggagag

SEQ ID NO: 35168 - DNA, 15 bp, Homo sapiens
ctgtctcaggagagg

SEQ ID NO: 35169 - DNA, 15 bp, Homo sapiens
tgtctcaggagagga

SEQ ID NO: 35170 - DNA, 15 bp, Homo sapiens
gtctcaggagaggag

SEQ ID NO: 35171 - DNA, 15 bp, Homo sapiens
tctcaggagaggagg

SEQ ID NO: 35172 - DNA, 15 bp, Homo sapiens
ctcaggagaggagga

SEQ ID NO: 35173 - DNA, 15 bp, Homo sapiens
tcaggagaggaggag

SEQ ID NO: 35174 - DNA, 15 bp, Homo sapiens
caggagaggaggagg

SEQ ID NO: 35175 - DNA, 15 bp, Homo sapiens
aggagaggaggaggc

SEQ ID NO: 35176 - DNA, 15 bp, Homo sapiens
ggagaggaggaggcc

SEQ ID NO: 35177 - DNA, 15 bp, Homo sapiens
gagaggaggaggccg

SEQ ID NO: 35178 - DNA, 15 bp, Homo sapiens
agaggaggaggccgt

SEQ ID NO: 35179 - DNA, 15 bp, Homo sapiens
gaggaggaggccgta

SEQ ID NO: 35180 - DNA, 15 bp, Homo sapiens
aggaggaggccgtat

SEQ ID NO: 35181 - DNA, 15 bp, Homo sapiens
ggaggaggccgtatt

SEQ ID NO: 35182 - DNA, 15 bp, Homo sapiens
gaggaggccgtattg

SEQ ID NO: 35183 - DNA, 15 bp, Homo sapiens
aggaggccgtattgt

SEQ ID NO: 35184 - DNA, 15 bp, Homo sapiens
ggaggccgtattgta

SEQ ID NO: 35185 - DNA, 15 bp, Homo sapiens
gaggccgtattgtag

SEQ ID NO: 35186 - DNA, 15 bp, Homo sapiens
aggccgtattgtagt

SEQ ID NO: 35187 - DNA, 15 bp, Homo sapiens
ggccgtattgtagtc

SEQ ID NO: 35188 - DNA, 15 bp, Homo sapiens
gccgtattgtagtcc

SEQ ID NO: 35189 - DNA, 15 bp, Homo sapiens
ccgtattgtagtccc

SEQ ID NO: 35190 - DNA, 15 bp, Homo sapiens
cgtattgtagtccca

SEQ ID NO: 35191 - DNA, 15 bp, Homo sapiens
gtattgtagtcccat

SEQ ID NO: 35192 - DNA, 15 bp, Homo sapiens
tattgtagtcccatg

SEQ ID NO: 35193 - DNA, 15 bp, Homo sapiens
attgtagtcccatga

SEQ ID NO: 35194 - DNA, 15 bp, Homo sapiens
ttgtagtcccatgag

SEQ ID NO: 35195 - DNA, 15 bp, Homo sapiens
tgtagtcccatgagc

SEQ ID NO: 35196 - DNA, 15 bp, Homo sapiens
gtagtcccatgagca

SEQ ID NO: 35197 - DNA, 15 bp, Homo sapiens
tagtcccatgagcat

SEQ ID NO: 35198 - DNA, 15 bp, Homo sapiens
agtcccatgagcata

SEQ ID NO: 35199 - DNA, 15 bp, Homo sapiens
gtcccatgagcatag

SEQ ID NO: 35200 - DNA, 15 bp, Homo sapiens
tcccatgagcatagc

SEQ ID NO: 35201 - DNA, 15 bp, Homo sapiens
cccatgagcatagct

SEQ ID NO: 35202 - DNA, 15 bp, Homo sapiens
ccatgagcatagcta

SEQ ID NO: 35203 - DNA, 15 bp, Homo sapiens
catgagcatagctat

SEQ ID NO: 35204 - DNA, 15 bp, Homo sapiens
atgagcatagctatg

SEQ ID NO: 35205 - DNA, 15 bp, Homo sapiens
tgagcatagctatgt

SEQ ID NO: 35206 - DNA, 15 bp, Homo sapiens
gagcatagctatgtg

SEQ ID NO: 35207 - DNA, 15 bp, Homo sapiens
agcatagctatgtgt

SEQ ID NO: 35208 - DNA, 15 bp, Homo sapiens
gcatagctatgtgtc

SEQ ID NO: 35209 - DNA, 15 bp, Homo sapiens
catagctatgtgtcc

SEQ ID NO: 35210 - DNA, 15 bp, Homo sapiens
atagctatgtgtccc

SEQ ID NO: 35211 - DNA, 15 bp, Homo sapiens
tagctatgtgtcccc

SEQ ID NO: 35212 - DNA, 15 bp, Homo sapiens
agctatgtgtcccca

SEQ ID NO: 35213 - DNA, 15 bp, Homo sapiens
gctatgtgtccccat

SEQ ID NO: 35214 - DNA, 15 bp, Homo sapiens
ctatgtgtccccatc

SEQ ID NO: 35215 - DNA, 15 bp, Homo sapiens
tatgtgtccccatcc

SEQ ID NO: 35216 - DNA, 15 bp, Homo sapiens
atgtgtccccatccc

SEQ ID NO: 35217 - DNA, 15 bp, Homo sapiens
tgtgtccccatcccc

SEQ ID NO: 35218 - DNA, 15 bp, Homo sapiens
gtgtccccatcccca

SEQ ID NO: 35219 - DNA, 15 bp, Homo sapiens
tgtccccatccccat

SEQ ID NO: 35220 - DNA, 15 bp, Homo sapiens
gtccccatccccatg

SEQ ID NO: 35221 - DNA, 15 bp, Homo sapiens
tccccatccccatgt

SEQ ID NO: 35222 - DNA, 15 bp, Homo sapiens
ccccatccccatgtg

SEQ ID NO: 35223 - DNA, 15 bp, Homo sapiens
cccatccccatgtga

SEQ ID NO: 35224 - DNA, 15 bp, Homo sapiens
ccatccccatgtgac

SEQ ID NO: 35225 - DNA, 15 bp, Homo sapiens
catccccatgtgaca

SEQ ID NO: 35226 - DNA, 15 bp, Homo sapiens
atccccatgtgacaa

SEQ ID NO: 35227 - DNA, 15 bp, Homo sapiens
tccccatgtgacaag

SEQ ID NO: 35228 - DNA, 15 bp, Homo sapiens
ccccatgtgacaaga

SEQ ID NO: 35229 - DNA, 15 bp, Homo sapiens
cccatgtgacaagag

SEQ ID NO: 35230 - DNA, 15 bp, Homo sapiens
ccatgtgacaagaga

SEQ ID NO: 35231 - DNA, 15 bp, Homo sapiens
catgtgacaagagaa

SEQ ID NO: 35232 - DNA, 15 bp, Homo sapiens
atgtgacaagagaag

SEQ ID NO: 35233 - DNA, 15 bp, Homo sapiens
tgtgacaagagaaga

SEQ ID NO: 35234 - DNA, 15 bp, Homo sapiens
gtgacaagagaagag

SEQ ID NO: 35235 - DNA, 15 bp, Homo sapiens
tgacaagagaagagg

SEQ ID NO: 35236 - DNA, 15 bp, Homo sapiens
gacaagagaagagga

SEQ ID NO: 35237 - DNA, 15 bp, Homo sapiens
acaagagaagaggac

SEQ ID NO: 35238 - DNA, 15 bp, Homo sapiens
caagagaagaggact

SEQ ID NO: 35239 - DNA, 15 bp, Homo sapiens
aagagaagaggactg

SEQ ID NO: 35240 - DNA, 15 bp, Homo sapiens
agagaagaggactgg

SEQ ID NO: 35241 - DNA, 15 bp, Homo sapiens
gagaagaggactggg

SEQ ID NO: 35242 - DNA, 15 bp, Homo sapiens
agaagaggactgggg

SEQ ID NO: 35243 - DNA, 15 bp, Homo sapiens
gaagaggactggggc

SEQ ID NO: 35244 - DNA, 15 bp, Homo sapiens
aagaggactggggcc

SEQ ID NO: 35245 - DNA, 15 bp, Homo sapiens
agaggactggggcca

SEQ ID NO: 35246 - DNA, 15 bp, Homo sapiens
gaggactggggccaa

SEQ ID NO: 35247 - DNA, 15 bp, Homo sapiens
aggactggggccaag

SEQ ID NO: 35248 - DNA, 15 bp, Homo sapiens
ggactggggccaagt

SEQ ID NO: 35249 - DNA, 15 bp, Homo sapiens
gactggggccaagta

SEQ ID NO: 35250 - DNA, 15 bp, Homo sapiens
actggggccaagtag

SEQ ID NO: 35251 - DNA, 15 bp, Homo sapiens
ctggggccaagtagg

SEQ ID NO: 35252 - DNA, 15 bp, Homo sapiens
tggggccaagtaggt

SEQ ID NO: 35253 - DNA, 15 bp, Homo sapiens
ggggccaagtaggtg

SEQ ID NO: 35254 - DNA, 15 bp, Homo sapiens
gggccaagtaggtga

SEQ ID NO: 35255 - DNA, 15 bp, Homo sapiens
ggccaagtaggtgag

SEQ ID NO: 35256 - DNA, 15 bp, Homo sapiens
gccaagtaggtgagg

SEQ ID NO: 35257 - DNA, 15 bp, Homo sapiens
ccaagtaggtgaggt

SEQ ID NO: 35258 - DNA, 15 bp, Homo sapiens
caagtaggtgaggtg

SEQ ID NO: 35259 - DNA, 15 bp, Homo sapiens
aagtaggtgaggtga

SEQ ID NO: 35260 - DNA, 15 bp, Homo sapiens
agtaggtgaggtgac

SEQ ID NO: 35261 - DNA, 15 bp, Homo sapiens
gtaggtgaggtgaca

SEQ ID NO: 35262 - DNA, 15 bp, Homo sapiens
taggtgaggtgacag

SEQ ID NO: 35263 - DNA, 15 bp, Homo sapiens
aggtgaggtgacagg

SEQ ID NO: 35264 - DNA, 15 bp, Homo sapiens
ggtgaggtgacaggg

SEQ ID NO: 35265 - DNA, 15 bp, Homo sapiens
gtgaggtgacagggc

SEQ ID NO: 35266 - DNA, 15 bp, Homo sapiens
tgaggtgacagggct

SEQ ID NO: 35267 - DNA, 15 bp, Homo sapiens
gaggtgacagggctg

SEQ ID NO: 35268 - DNA, 15 bp, Homo sapiens
aggtgacagggctga

SEQ ID NO: 35269 - DNA, 15 bp, Homo sapiens
ggtgacagggctgag

SEQ ID NO: 35270 - DNA, 15 bp, Homo sapiens
gtgacagggctgagg

SEQ ID NO: 35271 - DNA, 15 bp, Homo sapiens
tgacagggctgaggc

SEQ ID NO: 35272 - DNA, 15 bp, Homo sapiens
gacagggctgaggcc

SEQ ID NO: 35273 - DNA, 15 bp, Homo sapiens
acagggctgaggcca

SEQ ID NO: 35274 - DNA, 15 bp, Homo sapiens
cagggctgaggccag

SEQ ID NO: 35275 - DNA, 15 bp, Homo sapiens
agggctgaggccagc

SEQ ID NO: 35276 - DNA, 15 bp, Homo sapiens
gggctgaggccagct

SEQ ID NO: 35277 - DNA, 15 bp, Homo sapiens
ggctgaggccagctc

SEQ ID NO: 35278 - DNA, 15 bp, Homo sapiens
gctgaggccagctct

SEQ ID NO: 35279 - DNA, 15 bp, Homo sapiens
ctgaggccagctctg

SEQ ID NO: 35280 - DNA, 15 bp, Homo sapiens
tgaggccagctctgc

SEQ ID NO: 35281 - DNA, 15 bp, Homo sapiens
gaggccagctctgca

SEQ ID NO: 35282 - DNA, 15 bp, Homo sapiens
aggccagctctgcaa

SEQ ID NO: 35283 - DNA, 15 bp, Homo sapiens
ggccagctctgcaac

SEQ ID NO: 35284 - DNA, 15 bp, Homo sapiens
gccagctctgcaact

SEQ ID NO: 35285 - DNA, 15 bp, Homo sapiens
ccagctctgcaactt

SEQ ID NO: 35286 - DNA, 15 bp, Homo sapiens
cagctctgcaactta

SEQ ID NO: 35287 - DNA, 15 bp, Homo sapiens
agctctgcaacttat

SEQ ID NO: 35288 - DNA, 15 bp, Homo sapiens
gctctgcaacttatt

SEQ ID NO: 35289 - DNA, 15 bp, Homo sapiens
ctctgcaacttatta

SEQ ID NO: 35290 - DNA, 15 bp, Homo sapiens
tctgcaacttattag

SEQ ID NO: 35291 - DNA, 15 bp, Homo sapiens
ctgcaacttattagc

SEQ ID NO: 35292 - DNA, 15 bp, Homo sapiens
tgcaacttattagct

SEQ ID NO: 35293 - DNA, 15 bp, Homo sapiens
gcaacttattagctg

SEQ ID NO: 35294 - DNA, 15 bp, Homo sapiens
caacttattagctgt

SEQ ID NO: 35295 - DNA, 15 bp, Homo sapiens
aacttattagctgtt

SEQ ID NO: 35296 - DNA, 15 bp, Homo sapiens
acttattagctgttt

SEQ ID NO: 35297 - DNA, 15 bp, Homo sapiens
cttattagctgtttg

SEQ ID NO: 35298 - DNA, 15 bp, Homo sapiens
ttattagctgtttga

SEQ ID NO: 35299 - DNA, 15 bp, Homo sapiens
tattagctgtttgat

SEQ ID NO: 35300 - DNA, 15 bp, Homo sapiens
attagctgtttgatc

SEQ ID NO: 35301 - DNA, 15 bp, Homo sapiens
ttagctgtttgatct

SEQ ID NO: 35302 - DNA, 15 bp, Homo sapiens
tagctgtttgatctt

SEQ ID NO: 35303 - DNA, 15 bp, Homo sapiens
agctgtttgatcttt

SEQ ID NO: 35304 - DNA, 15 bp, Homo sapiens
gctgtttgatcttta

SEQ ID NO: 35305 - DNA, 15 bp, Homo sapiens
ctgtttgatctttaa

SEQ ID NO: 35306 - DNA, 15 bp, Homo sapiens
tgtttgatctttaaa

SEQ ID NO: 35307 - DNA, 15 bp, Homo sapiens
gtttgatctttaaaa

SEQ ID NO: 35308 - DNA, 15 bp, Homo sapiens
tttgatctttaaaaa

SEQ ID NO: 35309 - DNA, 15 bp, Homo sapiens
ttgatctttaaaaag

SEQ ID NO: 35310 - DNA, 15 bp, Homo sapiens
tgatctttaaaaagt

SEQ ID NO: 35311 - DNA, 15 bp, Homo sapiens
gatctttaaaaagtt

SEQ ID NO: 35312 - DNA, 15 bp, Homo sapiens
atctttaaaaagtta

SEQ ID NO: 35313 - DNA, 15 bp, Homo sapiens
tctttaaaaagttac

SEQ ID NO: 35314 - DNA, 15 bp, Homo sapiens
ctttaaaaagttact

SEQ ID NO: 35315 - DNA, 15 bp, Homo sapiens
tttaaaaagttactc

SEQ ID NO: 35316 - DNA, 15 bp, Homo sapiens
ttaaaaagttactcg

SEQ ID NO: 35317 - DNA, 15 bp, Homo sapiens
taaaaagttactcga

SEQ ID NO: 35318 - DNA, 15 bp, Homo sapiens
aaaaagttactcgat

SEQ ID NO: 35319 - DNA, 15 bp, Homo sapiens
aaaagttactcgatc

SEQ ID NO: 35320 - DNA, 15 bp, Homo sapiens
aaagttactcgatct

SEQ ID NO: 35321 - DNA, 15 bp, Homo sapiens
aagttactcgatctc

SEQ ID NO: 35322 - DNA, 15 bp, Homo sapiens
agttactcgatctcc

SEQ ID NO: 35323 - DNA, 15 bp, Homo sapiens
gttactcgatctcca

SEQ ID NO: 35324 - DNA, 15 bp, Homo sapiens
ttactcgatctccat

SEQ ID NO: 35325 - DNA, 15 bp, Homo sapiens
tactcgatctccatg

SEQ ID NO: 35326 - DNA, 15 bp, Homo sapiens
actcgatctccatga

SEQ ID NO: 35327 - DNA, 15 bp, Homo sapiens
ctcgatctccatgag

SEQ ID NO: 35328 - DNA, 15 bp, Homo sapiens
tcgatctccatgagc

SEQ ID NO: 35329 - DNA, 15 bp, Homo sapiens
cgatctccatgagcc

SEQ ID NO: 35330 - DNA, 15 bp, Homo sapiens
gatctccatgagcct

SEQ ID NO: 35331 - DNA, 15 bp, Homo sapiens
atctccatgagcctc

SEQ ID NO: 35332 - DNA, 15 bp, Homo sapiens
tctccatgagcctca

SEQ ID NO: 35333 - DNA, 15 bp, Homo sapiens
ctccatgagcctcag

SEQ ID NO: 35334 - DNA, 15 bp, Homo sapiens
tccatgagcctcagt

SEQ ID NO: 35335 - DNA, 15 bp, Homo sapiens
ccatgagcctcagtt

SEQ ID NO: 35336 - DNA, 15 bp, Homo sapiens
catgagcctcagttt

SEQ ID NO: 35337 - DNA, 15 bp, Homo sapiens
atgagcctcagtttc

SEQ ID NO: 35338 - DNA, 15 bp, Homo sapiens
tgagcctcagtttcc

SEQ ID NO: 35339 - DNA, 15 bp, Homo sapiens
gagcctcagtttcca

SEQ ID NO: 35340 - DNA, 15 bp, Homo sapiens
agcctcagtttccat

SEQ ID NO: 35341 - DNA, 15 bp, Homo sapiens
gcctcagtttccata

SEQ ID NO: 35342 - DNA, 15 bp, Homo sapiens
cctcagtttccatac

SEQ ID NO: 35343 - DNA, 15 bp, Homo sapiens
ctcagtttccatacg

SEQ ID NO: 35344 - DNA, 15 bp, Homo sapiens
tcagtttccatacgt

SEQ ID NO: 35345 - DNA, 15 bp, Homo sapiens
cagtttccatacgtg

SEQ ID NO: 35346 - DNA, 15 bp, Homo sapiens
agtttccatacgtgt

SEQ ID NO: 35347 - DNA, 15 bp, Homo sapiens
gtttccatacgtgta

SEQ ID NO: 35348 - DNA, 15 bp, Homo sapiens
tttccatacgtgtaa

SEQ ID NO: 35349 - DNA, 15 bp, Homo sapiens
ttccatacgtgtaaa

SEQ ID NO: 35350 - DNA, 15 bp, Homo sapiens
tccatacgtgtaaaa

SEQ ID NO: 35351 - DNA, 15 bp, Homo sapiens
ccatacgtgtaaaag

SEQ ID NO: 35352 - DNA, 15 bp, Homo sapiens
catacgtgtaaaagg

SEQ ID NO: 35353 - DNA, 15 bp, Homo sapiens
atacgtgtaaaaggg

SEQ ID NO: 35354 - DNA, 15 bp, Homo sapiens
tacgtgtaaaagggg

SEQ ID NO: 35355 - DNA, 15 bp, Homo sapiens
acgtgtaaaaggggg

SEQ ID NO: 35356 - DNA, 15 bp, Homo sapiens
cgtgtaaaaggggga

SEQ ID NO: 35357 - DNA, 15 bp, Homo sapiens
gtgtaaaagggggat

SEQ ID NO: 35358 - DNA, 15 bp, Homo sapiens
tgtaaaagggggatg

SEQ ID NO: 35359 - DNA, 15 bp, Homo sapiens
gtaaaagggggatga

SEQ ID NO: 35360 - DNA, 15 bp, Homo sapiens
taaaagggggatgat

SEQ ID NO: 35361 - DNA, 15 bp, Homo sapiens
aaaagggggatgatc

SEQ ID NO: 35362 - DNA, 15 bp, Homo sapiens
aaagggggatgatca

SEQ ID NO: 35363 - DNA, 15 bp, Homo sapiens
aagggggatgatcat

SEQ ID NO: 35364 - DNA, 15 bp, Homo sapiens
agggggatgatcata

SEQ ID NO: 35365 - DNA, 15 bp, Homo sapiens
gggggatgatcatag

SEQ ID NO: 35366 - DNA, 15 bp, Homo sapiens
ggggatgatcatagc

SEQ ID NO: 35367 - DNA, 15 bp, Homo sapiens
gggatgatcatagca

SEQ ID NO: 35368 - DNA, 15 bp, Homo sapiens
ggatgatcatagcat

SEQ ID NO: 35369 - DNA, 15 bp, Homo sapiens
gatgatcatagcatc

SEQ ID NO: 35370 - DNA, 15 bp, Homo sapiens
atgatcatagcatct

SEQ ID NO: 35371 - DNA, 15 bp, Homo sapiens
tgatcatagcatcta

SEQ ID NO: 35372 - DNA, 15 bp, Homo sapiens
gatcatagcatctac

SEQ ID NO: 35373 - DNA, 15 bp, Homo sapiens
atcatagcatctacc

SEQ ID NO: 35374 - DNA, 15 bp, Homo sapiens
tcatagcatctacca

SEQ ID NO: 35375 - DNA, 15 bp, Homo sapiens
catagcatctaccat

SEQ ID NO: 35376 - DNA, 15 bp, Homo sapiens
atagcatctaccatg

SEQ ID NO: 35377 - DNA, 15 bp, Homo sapiens
tagcatctaccatgt

SEQ ID NO: 35378 - DNA, 15 bp, Homo sapiens
agcatctaccatgtg

SEQ ID NO: 35379 - DNA, 15 bp, Homo sapiens
gcatctaccatgtgg

SEQ ID NO: 35380 - DNA, 15 bp, Homo sapiens
catctaccatgtggg

SEQ ID NO: 35381 - DNA, 15 bp, Homo sapiens
atctaccatgtgggc

SEQ ID NO: 35382 - DNA, 15 bp, Homo sapiens
tctaccatgtgggct

SEQ ID NO: 35383 - DNA, 15 bp, Homo sapiens
ctaccatgtgggctt

SEQ ID NO: 35384 - DNA, 15 bp, Homo sapiens
taccatgtgggcttg

SEQ ID NO: 35385 - DNA, 15 bp, Homo sapiens
accatgtgggcttgc

SEQ ID NO: 35386 - DNA, 15 bp, Homo sapiens
ccatgtgggcttgca

SEQ ID NO: 35387 - DNA, 15 bp, Homo sapiens
catgtgggcttgcag

SEQ ID NO: 35388 - DNA, 15 bp, Homo sapiens
atgtgggcttgcagt

SEQ ID NO: 35389 - DNA, 15 bp, Homo sapiens
tgtgggcttgcagtg

SEQ ID NO: 35390 - DNA, 15 bp, Homo sapiens
gtgggcttgcagtgc

SEQ ID NO: 35391 - DNA, 15 bp, Homo sapiens
tgggcttgcagtgca

SEQ ID NO: 35392 - DNA, 15 bp, Homo sapiens
gggcttgcagtgcag

SEQ ID NO: 35393 - DNA, 15 bp, Homo sapiens
ggcttgcagtgcaga

SEQ ID NO: 35394 - DNA, 15 bp, Homo sapiens
gcttgcagtgcagag

SEQ ID NO: 35395 - DNA, 15 bp, Homo sapiens
cttgcagtgcagagt

SEQ ID NO: 35396 - DNA, 15 bp, Homo sapiens
ttgcagtgcagagta

SEQ ID NO: 35397 - DNA, 15 bp, Homo sapiens
tgcagtgcagagtat

SEQ ID NO: 35398 - DNA, 15 bp, Homo sapiens
gcagtgcagagtatt

SEQ ID NO: 35399 - DNA, 15 bp, Homo sapiens
cagtgcagagtattt

SEQ ID NO: 35400 - DNA, 15 bp, Homo sapiens
agtgcagagtatttg

SEQ ID NO: 35401 - DNA, 15 bp, Homo sapiens
gtgcagagtatttga

SEQ ID NO: 35402 - DNA, 15 bp, Homo sapiens
tgcagagtatttgaa

SEQ ID NO: 35403 - DNA, 15 bp, Homo sapiens
gcagagtatttgaat

SEQ ID NO: 35404 - DNA, 15 bp, Homo sapiens
cagagtatttgaatt

SEQ ID NO: 35405 - DNA, 15 bp, Homo sapiens
agagtatttgaatta

SEQ ID NO: 35406 - DNA, 15 bp, Homo sapiens
gagtatttgaattag

SEQ ID NO: 35407 - DNA, 15 bp, Homo sapiens
agtatttgaattaga

SEQ ID NO: 35408 - DNA, 15 bp, Homo sapiens
gtatttgaattagac

SEQ ID NO: 35409 - DNA, 15 bp, Homo sapiens
tatttgaattagaca

SEQ ID NO: 35410 - DNA, 15 bp, Homo sapiens
atttgaattagacac

SEQ ID NO: 35411 - DNA, 15 bp, Homo sapiens
tttgaattagacaca

SEQ ID NO: 35412 - DNA, 15 bp, Homo sapiens
ttgaattagacacag

SEQ ID NO: 35413 - DNA, 15 bp, Homo sapiens
tgaattagacacaga

SEQ ID NO: 35414 - DNA, 15 bp, Homo sapiens
gaattagacacagaa

SEQ ID NO: 35415 - DNA, 15 bp, Homo sapiens
aattagacacagaac

SEQ ID NO: 35416 - DNA, 15 bp, Homo sapiens
attagacacagaaca

SEQ ID NO: 35417 - DNA, 15 bp, Homo sapiens
ttagacacagaacag

SEQ ID NO: 35418 - DNA, 15 bp, Homo sapiens
tagacacagaacagt

SEQ ID NO: 35419 - DNA, 15 bp, Homo sapiens
agacacagaacagtg

SEQ ID NO: 35420 - DNA, 15 bp, Homo sapiens
gacacagaacagtga

SEQ ID NO: 35421 - DNA, 15 bp, Homo sapiens
acacagaacagtgag

SEQ ID NO: 35422 - DNA, 15 bp, Homo sapiens
cacagaacagtgagg

SEQ ID NO: 35423 - DNA, 15 bp, Homo sapiens
acagaacagtgagga

SEQ ID NO: 35424 - DNA, 15 bp, Homo sapiens
cagaacagtgaggat

SEQ ID NO: 35425 - DNA, 15 bp, Homo sapiens
agaacagtgaggatc

SEQ ID NO: 35426 - DNA, 15 bp, Homo sapiens
gaacagtgaggatca

SEQ ID NO: 35427 - DNA, 15 bp, Homo sapiens
aacagtgaggatcag

SEQ ID NO: 35428 - DNA, 15 bp, Homo sapiens
acagtgaggatcagg

SEQ ID NO: 35429 - DNA, 15 bp, Homo sapiens
cagtgaggatcagga

SEQ ID NO: 35430 - DNA, 15 bp, Homo sapiens
agtgaggatcaggat

SEQ ID NO: 35431 - DNA, 15 bp, Homo sapiens
gtgaggatcaggatg

SEQ ID NO: 35432 - DNA, 15 bp, Homo sapiens
tgaggatcaggatgg

SEQ ID NO: 35433 - DNA, 15 bp, Homo sapiens
gaggatcaggatggc

SEQ ID NO: 35434 - DNA, 15 bp, Homo sapiens
aggatcaggatggcc

SEQ ID NO: 35435 - DNA, 15 bp, Homo sapiens
ggatcaggatggcct

SEQ ID NO: 35436 - DNA, 15 bp, Homo sapiens
gatcaggatggcctc

SEQ ID NO: 35437 - DNA, 15 bp, Homo sapiens
atcaggatggcctct

SEQ ID NO: 35438 - DNA, 15 bp, Homo sapiens
tcaggatggcctctc

SEQ ID NO: 35439 - DNA, 15 bp, Homo sapiens
caggatggcctctca

SEQ ID NO: 35440 - DNA, 15 bp, Homo sapiens
aggatggcctctcac

SEQ ID NO: 35441 - DNA, 15 bp, Homo sapiens
ggatggcctctcacc

SEQ ID NO: 35442 - DNA, 15 bp, Homo sapiens
gatggcctctcaccc

SEQ ID NO: 35443 - DNA, 15 bp, Homo sapiens
atggcctctcaccca

SEQ ID NO: 35444 - DNA, 15 bp, Homo sapiens
tggcctctcacccac

SEQ ID NO: 35445 - DNA, 15 bp, Homo sapiens
ggcctctcacccacc

SEQ ID NO: 35446 - DNA, 15 bp, Homo sapiens
gcctctcacccacct

SEQ ID NO: 35447 - DNA, 15 bp, Homo sapiens
cctctcacccacctg

SEQ ID NO: 35448 - DNA, 15 bp, Homo sapiens
ctctcacccacctgc

SEQ ID NO: 35449 - DNA, 15 bp, Homo sapiens
tctcacccacctgcc

SEQ ID NO: 35450 - DNA, 15 bp, Homo sapiens
ctcacccacctgcct

SEQ ID NO: 35451 - DNA, 15 bp, Homo sapiens
tcacccacctgcctt

SEQ ID NO: 35452 - DNA, 15 bp, Homo sapiens
cacccacctgccttt

SEQ ID NO: 35453 - DNA, 15 bp, Homo sapiens
acccacctgcctttc

SEQ ID NO: 35454 - DNA, 15 bp, Homo sapiens
cccacctgcctttct

SEQ ID NO: 35455 - DNA, 15 bp, Homo sapiens
ccacctgcctttctg

SEQ ID NO: 35456 - DNA, 15 bp, Homo sapiens
cacctgcctttctgc

SEQ ID NO: 35457 - DNA, 15 bp, Homo sapiens
acctgcctttctgcc

SEQ ID NO: 35458 - DNA, 15 bp, Homo sapiens
cctgcctttctgccc

SEQ ID NO: 35459 - DNA, 15 bp, Homo sapiens
ctgcctttctgccca

SEQ ID NO: 35460 - DNA, 15 bp, Homo sapiens
tgcctttctgcccag

SEQ ID NO: 35461 - DNA, 15 bp, Homo sapiens
gcctttctgcccagc

SEQ ID NO: 35462 - DNA, 15 bp, Homo sapiens
cctttctgcccagct

SEQ ID NO: 35463 - DNA, 15 bp, Homo sapiens
ctttctgcccagctg

SEQ ID NO: 35464 - DNA, 15 bp, Homo sapiens
tttctgcccagctgc

SEQ ID NO: 35465 - DNA, 15 bp, Homo sapiens
ttctgcccagctgcc

SEQ ID NO: 35466 - DNA, 15 bp, Homo sapiens
tctgcccagctgccc

SEQ ID NO: 35467 - DNA, 15 bp, Homo sapiens
ctgcccagctgccca

SEQ ID NO: 35468 - DNA, 15 bp, Homo sapiens
tgcccagctgcccac

SEQ ID NO: 35469 - DNA, 15 bp, Homo sapiens
gcccagctgcccaca

SEQ ID NO: 35470 - DNA, 15 bp, Homo sapiens
cccagctgcccacac

SEQ ID NO: 35471 - DNA, 15 bp, Homo sapiens
ccagctgcccacact

SEQ ID NO: 35472 - DNA, 15 bp, Homo sapiens
cagctgcccacactg

SEQ ID NO: 35473 - DNA, 15 bp, Homo sapiens
agctgcccacactgc

SEQ ID NO: 35474 - DNA, 15 bp, Homo sapiens
gctgcccacactgcc

SEQ ID NO: 35475 - DNA, 15 bp, Homo sapiens
ctgcccacactgccc

SEQ ID NO: 35476 - DNA, 15 bp, Homo sapiens
tgcccacactgcccc

SEQ ID NO: 35477 - DNA, 15 bp, Homo sapiens
gcccacactgcccct

SEQ ID NO: 35478 - DNA, 15 bp, Homo sapiens
cccacactgccccta

SEQ ID NO: 35479 - DNA, 15 bp, Homo sapiens
ccacactgcccctag

SEQ ID NO: 35480 - DNA, 15 bp, Homo sapiens
cacactgcccctagt

SEQ ID NO: 35481 - DNA, 15 bp, Homo sapiens
acactgcccctagtc

SEQ ID NO: 35482 - DNA, 15 bp, Homo sapiens
cactgcccctagtca

SEQ ID NO: 35483 - DNA, 15 bp, Homo sapiens
actgcccctagtcat

SEQ ID NO: 35484 - DNA, 15 bp, Homo sapiens
ctgcccctagtcatg

SEQ ID NO: 35485 - DNA, 15 bp, Homo sapiens
tgcccctagtcatgg

SEQ ID NO: 35486 - DNA, 15 bp, Homo sapiens
gcccctagtcatggt

SEQ ID NO: 35487 - DNA, 15 bp, Homo sapiens
cccctagtcatggtg

SEQ ID NO: 35488 - DNA, 15 bp, Homo sapiens
ccctagtcatggtgg

SEQ ID NO: 35489 - DNA, 15 bp, Homo sapiens
cctagtcatggtggc

SEQ ID NO: 35490 - DNA, 15 bp, Homo sapiens
ctagtcatggtggca

SEQ ID NO: 35491 - DNA, 15 bp, Homo sapiens
tagtcatggtggcac

SEQ ID NO: 35492 - DNA, 15 bp, Homo sapiens
agtcatggtggcacc

SEQ ID NO: 35493 - DNA, 15 bp, Homo sapiens
gtcatggtggcaccc

SEQ ID NO: 35494 - DNA, 15 bp, Homo sapiens
tcatggtggcaccct

SEQ ID NO: 35495 - DNA, 15 bp, Homo sapiens
catggtggcaccctc

SEQ ID NO: 35496 - DNA, 15 bp, Homo sapiens
atggtggcaccctcc

SEQ ID NO: 35497 - DNA, 15 bp, Homo sapiens
tggtggcaccctccg

SEQ ID NO: 35498 - DNA, 15 bp, Homo sapiens
ggtggcaccctccgg

SEQ ID NO: 35499 - DNA, 15 bp, Homo sapiens
gtggcaccctccggg

SEQ ID NO: 35500 - DNA, 15 bp, Homo sapiens
tggcaccctccgggg

SEQ ID NO: 35501 - DNA, 15 bp, Homo sapiens
ggcaccctccggggc

SEQ ID NO: 35502 - DNA, 15 bp, Homo sapiens
gcaccctccggggca

SEQ ID NO: 35503 - DNA, 15 bp, Homo sapiens
caccctccggggcac

SEQ ID NO: 35504 - DNA, 15 bp, Homo sapiens
accctccggggcacg

SEQ ID NO: 35505 - DNA, 15 bp, Homo sapiens
ccctccggggcacgg

SEQ ID NO: 35506 - DNA, 15 bp, Homo sapiens
cctccggggcacggc

SEQ ID NO: 35507 - DNA, 15 bp, Homo sapiens
ctccggggcacggct

SEQ ID NO: 35508 - DNA, 15 bp, Homo sapiens
tccggggcacggctg

SEQ ID NO: 35509 - DNA, 15 bp, Homo sapiens
ccggggcacggctgg

SEQ ID NO: 35510 - DNA, 15 bp, Homo sapiens
cggggcacggctggg

SEQ ID NO: 35511 - DNA, 15 bp, Homo sapiens
ggggcacggctgggc

SEQ ID NO: 35512 - DNA, 15 bp, Homo sapiens
gggcacggctgggcc

SEQ ID NO: 35513 - DNA, 15 bp, Homo sapiens
ggcacggctgggccc

SEQ ID NO: 35514 - DNA, 15 bp, Homo sapiens
gcacggctgggcccc

SEQ ID NO: 35515 - DNA, 15 bp, Homo sapiens
cacggctgggcccct

SEQ ID NO: 35516 - DNA, 15 bp, Homo sapiens
acggctgggcccctt

SEQ ID NO: 35517 - DNA, 15 bp, Homo sapiens
cggctgggccccttg

SEQ ID NO: 35518 - DNA, 15 bp, Homo sapiens
ggctgggccccttgc

SEQ ID NO: 35519 - DNA, 15 bp, Homo sapiens
gctgggccccttgcc

SEQ ID NO: 35520 - DNA, 15 bp, Homo sapiens
ctgggccccttgccc

SEQ ID NO: 35521 - DNA, 15 bp, Homo sapiens
tgggccccttgcccc

SEQ ID NO: 35522 - DNA, 15 bp, Homo sapiens
gggccccttgcccca

SEQ ID NO: 35523 - DNA, 15 bp, Homo sapiens
ggccccttgccccac

SEQ ID NO: 35524 - DNA, 15 bp, Homo sapiens
gccccttgccccact

SEQ ID NO: 35525 - DNA, 15 bp, Homo sapiens
ccccttgccccactt

SEQ ID NO: 35526 - DNA, 15 bp, Homo sapiens
cccttgccccactta

SEQ ID NO: 35527 - DNA, 15 bp, Homo sapiens
ccttgccccacttac

SEQ ID NO: 35528 - DNA, 15 bp, Homo sapiens
cttgccccacttaca

SEQ ID NO: 35529 - DNA, 15 bp, Homo sapiens
ttgccccacttacag

SEQ ID NO: 35530 - DNA, 15 bp, Homo sapiens
tgccccacttacagg

SEQ ID NO: 35531 - DNA, 15 bp, Homo sapiens
gccccacttacaggc

SEQ ID NO: 35532 - DNA, 15 bp, Homo sapiens
ccccacttacaggca

SEQ ID NO: 35533 - DNA, 15 bp, Homo sapiens
cccacttacaggcac

SEQ ID NO: 35534 - DNA, 15 bp, Homo sapiens
ccacttacaggcact

SEQ ID NO: 35535 - DNA, 15 bp, Homo sapiens
cacttacaggcactc

SEQ ID NO: 35536 - DNA, 15 bp, Homo sapiens
acttacaggcactcc

SEQ ID NO: 35537 - DNA, 15 bp, Homo sapiens
cttacaggcactcct

SEQ ID NO: 35538 - DNA, 15 bp, Homo sapiens
ttacaggcactcctc

SEQ ID NO: 35539 - DNA, 15 bp, Homo sapiens
tacaggcactcctcc

SEQ ID NO: 35540 - DNA, 15 bp, Homo sapiens
acaggcactcctcca

SEQ ID NO: 35541 - DNA, 15 bp, Homo sapiens
caggcactcctccag

SEQ ID NO: 35542 - DNA, 15 bp, Homo sapiens
aggcactcctccagg

SEQ ID NO: 35543 - DNA, 15 bp, Homo sapiens
ggcactcctccagga

SEQ ID NO: 35544 - DNA, 15 bp, Homo sapiens
gcactcctccaggac

SEQ ID NO: 35545 - DNA, 15 bp, Homo sapiens
cactcctccaggaca

SEQ ID NO: 35546 - DNA, 15 bp, Homo sapiens
actcctccaggacag

SEQ ID NO: 35547 - DNA, 15 bp, Homo sapiens
ctcctccaggacagg

SEQ ID NO: 35548 - DNA, 15 bp, Homo sapiens
tcctccaggacaggc

SEQ ID NO: 35549 - DNA, 15 bp, Homo sapiens
cctccaggacaggcc

SEQ ID NO: 35550 - DNA, 15 bp, Homo sapiens
ctccaggacaggcca

SEQ ID NO: 35551 - DNA, 15 bp, Homo sapiens
tccaggacaggccac

SEQ ID NO: 35552 - DNA, 15 bp, Homo sapiens
ccaggacaggccaca

SEQ ID NO: 35553 - DNA, 15 bp, Homo sapiens
caggacaggccacat

SEQ ID NO: 35554 - DNA, 15 bp, Homo sapiens
aggacaggccacatt

SEQ ID NO: 35555 - DNA, 15 bp, Homo sapiens
ggacaggccacattt

SEQ ID NO: 35556 - DNA, 15 bp, Homo sapiens
gacaggccacatttc

SEQ ID NO: 35557 - DNA, 15 bp, Homo sapiens
acaggccacatttca

SEQ ID NO: 35558 - DNA, 15 bp, Homo sapiens
caggccacatttcat

SEQ ID NO: 35559 - DNA, 15 bp, Homo sapiens
aggccacatttcatg

SEQ ID NO: 35560 - DNA, 15 bp, Homo sapiens
ggccacatttcatgc

SEQ ID NO: 35561 - DNA, 15 bp, Homo sapiens
gccacatttcatgca

SEQ ID NO: 35562 - DNA, 15 bp, Homo sapiens
ccacatttcatgcac

SEQ ID NO: 35563 - DNA, 15 bp, Homo sapiens
cacatttcatgcacc

SEQ ID NO: 35564 - DNA, 15 bp, Homo sapiens
acatttcatgcacca

SEQ ID NO: 35565 - DNA, 15 bp, Homo sapiens
catttcatgcaccag

SEQ ID NO: 35566 - DNA, 15 bp, Homo sapiens
atttcatgcaccagg

SEQ ID NO: 35567 - DNA, 15 bp, Homo sapiens
tttcatgcaccaggt

SEQ ID NO: 35568 - DNA, 15 bp, Homo sapiens
ttcatgcaccaggta

SEQ ID NO: 35569 - DNA, 15 bp, Homo sapiens
tcatgcaccaggtat

SEQ ID NO: 35570 - DNA, 15 bp, Homo sapiens
catgcaccaggtatg

SEQ ID NO: 35571 - DNA, 15 bp, Homo sapiens
atgcaccaggtatgg

SEQ ID NO: 35572 - DNA, 15 bp, Homo sapiens
tgcaccaggtatgga

SEQ ID NO: 35573 - DNA, 15 bp, Homo sapiens
gcaccaggtatggac

SEQ ID NO: 35574 - DNA, 15 bp, Homo sapiens
caccaggtatggacg

SEQ ID NO: 35575 - DNA, 15 bp, Homo sapiens
accaggtatggacgg

SEQ ID NO: 35576 - DNA, 15 bp, Homo sapiens
ccaggtatggacggt

SEQ ID NO: 35577 - DNA, 15 bp, Homo sapiens
caggtatggacggtg

SEQ ID NO: 35578 - DNA, 15 bp, Homo sapiens
aggtatggacggtga

SEQ ID NO: 35579 - DNA, 15 bp, Homo sapiens
ggtatggacggtgaa

SEQ ID NO: 35580 - DNA, 15 bp, Homo sapiens
gtatggacggtgaat

SEQ ID NO: 35581 - DNA, 15 bp, Homo sapiens
tatggacggtgaatg

SEQ ID NO: 35582 - DNA, 15 bp, Homo sapiens
atggacggtgaatgg

SEQ ID NO: 35583 - DNA, 15 bp, Homo sapiens
tggacggtgaatggg

SEQ ID NO: 35584 - DNA, 15 bp, Homo sapiens
ggacggtgaatgggc

SEQ ID NO: 35585 - DNA, 15 bp, Homo sapiens
gacggtgaatgggca

SEQ ID NO: 35586 - DNA, 15 bp, Homo sapiens
acggtgaatgggcag

SEQ ID NO: 35587 - DNA, 15 bp, Homo sapiens
cggtgaatgggcagg

SEQ ID NO: 35588 - DNA, 15 bp, Homo sapiens
ggtgaatgggcaggg

SEQ ID NO: 35589 - DNA, 15 bp, Homo sapiens
gtgaatgggcaggga

SEQ ID NO: 35590 - DNA, 15 bp, Homo sapiens
tgaatgggcagggag

SEQ ID NO: 35591 - DNA, 15 bp, Homo sapiens
gaatgggcagggagg

SEQ ID NO: 35592 - DNA, 15 bp, Homo sapiens
aatgggcagggagga

SEQ ID NO: 35593 - DNA, 15 bp, Homo sapiens
atgggcagggaggag

SEQ ID NO: 35594 - DNA, 15 bp, Homo sapiens
tgggcagggaggagg

SEQ ID NO: 35595 - DNA, 15 bp, Homo sapiens
gggcagggaggaggg

SEQ ID NO: 35596 - DNA, 15 bp, Homo sapiens
ggcagggaggaggga

SEQ ID NO: 35597 - DNA, 15 bp, Homo sapiens
gcagggaggagggag

SEQ ID NO: 35598 - DNA, 15 bp, Homo sapiens
cagggaggagggagc

SEQ ID NO: 35599 - DNA, 15 bp, Homo sapiens
agggaggagggagca

SEQ ID NO: 35600 - DNA, 15 bp, Homo sapiens
gggaggagggagcag

SEQ ID NO: 35601 - DNA, 15 bp, Homo sapiens
ggaggagggagcagg

SEQ ID NO: 35602 - DNA, 15 bp, Homo sapiens
gaggagggagcaggt

SEQ ID NO: 35603 - DNA, 15 bp, Homo sapiens
aggagggagcaggtg

SEQ ID NO: 35604 - DNA, 15 bp, Homo sapiens
ggagggagcaggtgg

SEQ ID NO: 35605 - DNA, 15 bp, Homo sapiens
gagggagcaggtggg

SEQ ID NO: 35606 - DNA, 15 bp, Homo sapiens
agggagcaggtggga

SEQ ID NO: 35607 - DNA, 15 bp, Homo sapiens
gggagcaggtgggag

SEQ ID NO: 35608 - DNA, 15 bp, Homo sapiens
ggagcaggtgggaga

SEQ ID NO: 35609 - DNA, 15 bp, Homo sapiens
gagcaggtgggagaa

SEQ ID NO: 35610 - DNA, 15 bp, Homo sapiens
agcaggtgggagaac

SEQ ID NO: 35611 - DNA, 15 bp, Homo sapiens
gcaggtgggagaact

SEQ ID NO: 35612 - DNA, 15 bp, Homo sapiens
caggtgggagaactg

SEQ ID NO: 35613 - DNA, 15 bp, Homo sapiens
aggtgggagaactgt

SEQ ID NO: 35614 - DNA, 15 bp, Homo sapiens
ggtgggagaactgtg

SEQ ID NO: 35615 - DNA, 15 bp, Homo sapiens
gtgggagaactgtgg

SEQ ID NO: 35616 - DNA, 15 bp, Homo sapiens
tgggagaactgtggg

SEQ ID NO: 35617 - DNA, 15 bp, Homo sapiens
gggagaactgtgggg

SEQ ID NO: 35618 - DNA, 15 bp, Homo sapiens
ggagaactgtgggga

SEQ ID NO: 35619 - DNA, 15 bp, Homo sapiens
gagaactgtggggag

SEQ ID NO: 35620 - DNA, 15 bp, Homo sapiens
agaactgtggggagg

SEQ ID NO: 35621 - DNA, 15 bp, Homo sapiens
gaactgtggggaggg

SEQ ID NO: 35622 - DNA, 15 bp, Homo sapiens
aactgtggggagggg

SEQ ID NO: 35623 - DNA, 15 bp, Homo sapiens
actgtggggaggggc

SEQ ID NO: 35624 - DNA, 15 bp, Homo sapiens
ctgtggggaggggcc

SEQ ID NO: 35625 - DNA, 15 bp, Homo sapiens
tgtggggaggggccc

SEQ ID NO: 35626 - DNA, 15 bp, Homo sapiens
gtggggaggggcccc

SEQ ID NO: 35627 - DNA, 15 bp, Homo sapiens
tggggaggggccccg

SEQ ID NO: 35628 - DNA, 15 bp, Homo sapiens
ggggaggggccccga

SEQ ID NO: 35629 - DNA, 15 bp, Homo sapiens
gggaggggccccgag

SEQ ID NO: 35630 - DNA, 15 bp, Homo sapiens
ggaggggccccgagt

SEQ ID NO: 35631 - DNA, 15 bp, Homo sapiens
gaggggccccgagtc

SEQ ID NO: 35632 - DNA, 15 bp, Homo sapiens
aggggccccgagtca

SEQ ID NO: 35633 - DNA, 15 bp, Homo sapiens
ggggccccgagtcag

SEQ ID NO: 35634 - DNA, 15 bp, Homo sapiens
gggccccgagtcagg

SEQ ID NO: 35635 - DNA, 15 bp, Homo sapiens
ggccccgagtcaggc

SEQ ID NO: 35636 - DNA, 15 bp, Homo sapiens
gccccgagtcaggct

SEQ ID NO: 35637 - DNA, 15 bp, Homo sapiens
ccccgagtcaggctg

SEQ ID NO: 35638 - DNA, 15 bp, Homo sapiens
cccgagtcaggctga

SEQ ID NO: 35639 - DNA, 15 bp, Homo sapiens
ccgagtcaggctgaa

SEQ ID NO: 35640 - DNA, 15 bp, Homo sapiens
cgagtcaggctgaac

SEQ ID NO: 35641 - DNA, 15 bp, Homo sapiens
gagtcaggctgaacc

SEQ ID NO: 35642 - DNA, 15 bp, Homo sapiens
agtcaggctgaacca

SEQ ID NO: 35643 - DNA, 15 bp, Homo sapiens
gtcaggctgaaccac

SEQ ID NO: 35644 - DNA, 15 bp, Homo sapiens
tcaggctgaaccaca

SEQ ID NO: 35645 - DNA, 15 bp, Homo sapiens
caggctgaaccacag

SEQ ID NO: 35646 - DNA, 15 bp, Homo sapiens
aggctgaaccacagc

SEQ ID NO: 35647 - DNA, 15 bp, Homo sapiens
ggctgaaccacagcc

SEQ ID NO: 35648 - DNA, 15 bp, Homo sapiens
gctgaaccacagccc

SEQ ID NO: 35649 - DNA, 15 bp, Homo sapiens
ctgaaccacagccca

SEQ ID NO: 35650 - DNA, 15 bp, Homo sapiens
tgaaccacagcccac

SEQ ID NO: 35651 - DNA, 15 bp, Homo sapiens
gaaccacagcccaca

SEQ ID NO: 35652 - DNA, 15 bp, Homo sapiens
aaccacagcccacat

SEQ ID NO: 35653 - DNA, 15 bp, Homo sapiens
accacagcccacatg

SEQ ID NO: 35654 - DNA, 15 bp, Homo sapiens
ccacagcccacatgt

SEQ ID NO: 35655 - DNA, 15 bp, Homo sapiens
cacagcccacatgtg

SEQ ID NO: 35656 - DNA, 15 bp, Homo sapiens
acagcccacatgtgc

SEQ ID NO: 35657 - DNA, 15 bp, Homo sapiens
cagcccacatgtgcc

SEQ ID NO: 35658 - DNA, 15 bp, Homo sapiens
agcccacatgtgccc

SEQ ID NO: 35659 - DNA, 15 bp, Homo sapiens
gcccacatgtgcccc

SEQ ID NO: 35660 - DNA, 15 bp, Homo sapiens
cccacatgtgccccc

SEQ ID NO: 35661 - DNA, 15 bp, Homo sapiens
ccacatgtgcccccc

SEQ ID NO: 35662 - DNA, 15 bp, Homo sapiens
cacatgtgcccccca

SEQ ID NO: 35663 - DNA, 15 bp, Homo sapiens
acatgtgccccccag

SEQ ID NO: 35664 - DNA, 15 bp, Homo sapiens
catgtgccccccagc

SEQ ID NO: 35665 - DNA, 15 bp, Homo sapiens
atgtgccccccagct

SEQ ID NO: 35666 - DNA, 15 bp, Homo sapiens
tgtgccccccagctc

SEQ ID NO: 35667 - DNA, 15 bp, Homo sapiens
gtgccccccagctct

SEQ ID NO: 35668 - DNA, 15 bp, Homo sapiens
tgccccccagctctc

SEQ ID NO: 35669 - DNA, 15 bp, Homo sapiens
gccccccagctctca

SEQ ID NO: 35670 - DNA, 15 bp, Homo sapiens
ccccccagctctcaa

SEQ ID NO: 35671 - DNA, 15 bp, Homo sapiens
cccccagctctcaac

SEQ ID NO: 35672 - DNA, 15 bp, Homo sapiens
ccccagctctcaacg

SEQ ID NO: 35673 - DNA, 15 bp, Homo sapiens
cccagctctcaacgg

SEQ ID NO: 35674 - DNA, 15 bp, Homo sapiens
ccagctctcaacggt

SEQ ID NO: 35675 - DNA, 15 bp, Homo sapiens
cagctctcaacggtg

SEQ ID NO: 35676 - DNA, 15 bp, Homo sapiens
agctctcaacggtgg

SEQ ID NO: 35677 - DNA, 15 bp, Homo sapiens
gctctcaacggtgga

SEQ ID NO: 35678 - DNA, 15 bp, Homo sapiens
ctctcaacggtggat

SEQ ID NO: 35679 - DNA, 15 bp, Homo sapiens
tctcaacggtggatg

SEQ ID NO: 35680 - DNA, 15 bp, Homo sapiens
ctcaacggtggatgc

SEQ ID NO: 35681 - DNA, 15 bp, Homo sapiens
tcaacggtggatgcc

SEQ ID NO: 35682 - DNA, 15 bp, Homo sapiens
caacggtggatgccc

SEQ ID NO: 35683 - DNA, 15 bp, Homo sapiens
aacggtggatgccca

SEQ ID NO: 35684 - DNA, 15 bp, Homo sapiens
acggtggatgcccac

SEQ ID NO: 35685 - DNA, 15 bp, Homo sapiens
cggtggatgcccacg

SEQ ID NO: 35686 - DNA, 15 bp, Homo sapiens
ggtggatgcccacgc

SEQ ID NO: 35687 - DNA, 15 bp, Homo sapiens
gtggatgcccacgcc

SEQ ID NO: 35688 - DNA, 15 bp, Homo sapiens
tggatgcccacgccc

SEQ ID NO: 35689 - DNA, 15 bp, Homo sapiens
ggatgcccacgcccg

SEQ ID NO: 35690 - DNA, 15 bp, Homo sapiens
gatgcccacgcccgg

SEQ ID NO: 35691 - DNA, 15 bp, Homo sapiens
atgcccacgcccgga

SEQ ID NO: 35692 - DNA, 15 bp, Homo sapiens
tgcccacgcccggac

SEQ ID NO: 35693 - DNA, 15 bp, Homo sapiens
gcccacgcccggacc

SEQ ID NO: 35694 - DNA, 15 bp, Homo sapiens
cccacgcccggaccc

SEQ ID NO: 35695 - DNA, 15 bp, Homo sapiens
ccacgcccggacccc

SEQ ID NO: 35696 - DNA, 15 bp, Homo sapiens
cacgcccggacccct

SEQ ID NO: 35697 - DNA, 15 bp, Homo sapiens
acgcccggacccctg

SEQ ID NO: 35698 - DNA, 15 bp, Homo sapiens
cgcccggacccctgt

SEQ ID NO: 35699 - DNA, 15 bp, Homo sapiens
gcccggacccctgtg

SEQ ID NO: 35700 - DNA, 15 bp, Homo sapiens
cccggacccctgtgc

SEQ ID NO: 35701 - DNA, 15 bp, Homo sapiens
ccggacccctgtgct

SEQ ID NO: 35702 - DNA, 15 bp, Homo sapiens
cggacccctgtgctg

SEQ ID NO: 35703 - DNA, 15 bp, Homo sapiens
ggacccctgtgctgc

SEQ ID NO: 35704 - DNA, 15 bp, Homo sapiens
gacccctgtgctgca

SEQ ID NO: 35705 - DNA, 15 bp, Homo sapiens
acccctgtgctgcag

SEQ ID NO: 35706 - DNA, 15 bp, Homo sapiens
cccctgtgctgcagg

SEQ ID NO: 35707 - DNA, 15 bp, Homo sapiens
ccctgtgctgcaggt

SEQ ID NO: 35708 - DNA, 15 bp, Homo sapiens
cctgtgctgcaggtg

SEQ ID NO: 35709 - DNA, 15 bp, Homo sapiens
ctgtgctgcaggtgc

SEQ ID NO: 35710 - DNA, 15 bp, Homo sapiens
tgtgctgcaggtgca

SEQ ID NO: 35711 - DNA, 15 bp, Homo sapiens
gtgctgcaggtgcac

SEQ ID NO: 35712 - DNA, 15 bp, Homo sapiens
tgctgcaggtgcacc

SEQ ID NO: 35713 - DNA, 15 bp, Homo sapiens
gctgcaggtgcaccc

SEQ ID NO: 35714 - DNA, 15 bp, Homo sapiens
ctgcaggtgcacccc

SEQ ID NO: 35715 - DNA, 15 bp, Homo sapiens
tgcaggtgcaccccc

SEQ ID NO: 35716 - DNA, 15 bp, Homo sapiens
gcaggtgcaccccct

SEQ ID NO: 35717 - DNA, 15 bp, Homo sapiens
caggtgcaccccctg

SEQ ID NO: 35718 - DNA, 15 bp, Homo sapiens
aggtgcaccccctgg

SEQ ID NO: 35719 - DNA, 15 bp, Homo sapiens
ggtgcaccccctgga

SEQ ID NO: 35720 - DNA, 15 bp, Homo sapiens
gtgcaccccctggag

SEQ ID NO: 35721 - DNA, 15 bp, Homo sapiens
tgcaccccctggaga

SEQ ID NO: 35722 - DNA, 15 bp, Homo sapiens
gcaccccctggagag

SEQ ID NO: 35723 - DNA, 15 bp, Homo sapiens
caccccctggagagc

SEQ ID NO: 35724 - DNA, 15 bp, Homo sapiens
accccctggagagcc

SEQ ID NO: 35725 - DNA, 15 bp, Homo sapiens
ccccctggagagccc

SEQ ID NO: 35726 - DNA, 15 bp, Homo sapiens
cccctggagagccca

SEQ ID NO: 35727 - DNA, 15 bp, Homo sapiens
ccctggagagcccag

SEQ ID NO: 35728 - DNA, 15 bp, Homo sapiens
cctggagagcccagc

SEQ ID NO: 35729 - DNA, 15 bp, Homo sapiens
ctggagagcccagcc

SEQ ID NO: 35730 - DNA, 15 bp, Homo sapiens
tggagagcccagcca

SEQ ID NO: 35731 - DNA, 15 bp, Homo sapiens
ggagagcccagccat

SEQ ID NO: 35732 - DNA, 15 bp, Homo sapiens
gagagcccagccatg

SEQ ID NO: 35733 - DNA, 15 bp, Homo sapiens
agagcccagccatga

SEQ ID NO: 35734 - DNA, 15 bp, Homo sapiens
gagcccagccatgat

SEQ ID NO: 35735 - DNA, 15 bp, Homo sapiens
agcccagccatgatc

SEQ ID NO: 35736 - DNA, 15 bp, Homo sapiens
gcccagccatgatca

SEQ ID NO: 35737 - DNA, 15 bp, Homo sapiens
cccagccatgatcag

SEQ ID NO: 35738 - DNA, 15 bp, Homo sapiens
ccagccatgatcagc

SEQ ID NO: 35739 - DNA, 15 bp, Homo sapiens
cagccatgatcagcc

SEQ ID NO: 35740 - DNA, 15 bp, Homo sapiens
agccatgatcagcct

SEQ ID NO: 35741 - DNA, 15 bp, Homo sapiens
gccatgatcagcctc

SEQ ID NO: 35742 - DNA, 15 bp, Homo sapiens
ccatgatcagcctca

SEQ ID NO: 35743 - DNA, 15 bp, Homo sapiens
catgatcagcctcac

SEQ ID NO: 35744 - DNA, 15 bp, Homo sapiens
atgatcagcctcaca

SEQ ID NO: 35745 - DNA, 15 bp, Homo sapiens
tgatcagcctcacac

SEQ ID NO: 35746 - DNA, 15 bp, Homo sapiens
gatcagcctcacacc

SEQ ID NO: 35747 - DNA, 15 bp, Homo sapiens
atcagcctcacacca

SEQ ID NO: 35748 - DNA, 15 bp, Homo sapiens
tcagcctcacaccac

SEQ ID NO: 35749 - DNA, 15 bp, Homo sapiens
cagcctcacaccacc

SEQ ID NO: 35750 - DNA, 15 bp, Homo sapiens
agcctcacaccaccc

SEQ ID NO: 35751 - DNA, 15 bp, Homo sapiens
gcctcacaccaccca

SEQ ID NO: 35752 - DNA, 15 bp, Homo sapiens
cctcacaccacccac

SEQ ID NO: 35753 - DNA, 15 bp, Homo sapiens
ctcacaccacccacc

SEQ ID NO: 35754 - DNA, 15 bp, Homo sapiens
tcacaccacccacca

SEQ ID NO: 35755 - DNA, 15 bp, Homo sapiens
cacaccacccaccac

SEQ ID NO: 35756 - DNA, 15 bp, Homo sapiens
acaccacccaccacc

SEQ ID NO: 35757 - DNA, 15 bp, Homo sapiens
caccacccaccaccg

SEQ ID NO: 35758 - DNA, 15 bp, Homo sapiens
accacccaccaccgc

SEQ ID NO: 35759 - DNA, 15 bp, Homo sapiens
ccacccaccaccgcc

SEQ ID NO: 35760 - DNA, 15 bp, Homo sapiens
cacccaccaccgcca

SEQ ID NO: 35761 - DNA, 15 bp, Homo sapiens
acccaccaccgccac

SEQ ID NO: 35762 - DNA, 15 bp, Homo sapiens
cccaccaccgccact

SEQ ID NO: 35763 - DNA, 15 bp, Homo sapiens
ccaccaccgccactg

SEQ ID NO: 35764 - DNA, 15 bp, Homo sapiens
caccaccgccactgg

SEQ ID NO: 35765 - DNA, 15 bp, Homo sapiens
accaccgccactggg

SEQ ID NO: 35766 - DNA, 15 bp, Homo sapiens
ccaccgccactgggg

SEQ ID NO: 35767 - DNA, 15 bp, Homo sapiens
caccgccactggggt

SEQ ID NO: 35768 - DNA, 15 bp, Homo sapiens
accgccactggggtc

SEQ ID NO: 35769 - DNA, 15 bp, Homo sapiens
ccgccactggggtct

SEQ ID NO: 35770 - DNA, 15 bp, Homo sapiens
cgccactggggtctt

SEQ ID NO: 35771 - DNA, 15 bp, Homo sapiens
gccactggggtcttc

SEQ ID NO: 35772 - DNA, 15 bp, Homo sapiens
ccactggggtcttct

SEQ ID NO: 35773 - DNA, 15 bp, Homo sapiens
cactggggtcttctc

SEQ ID NO: 35774 - DNA, 15 bp, Homo sapiens
actggggtcttctcc

SEQ ID NO: 35775 - DNA, 15 bp, Homo sapiens
ctggggtcttctccc

SEQ ID NO: 35776 - DNA, 15 bp, Homo sapiens
tggggtcttctccct

SEQ ID NO: 35777 - DNA, 15 bp, Homo sapiens
ggggtcttctccctc

SEQ ID NO: 35778 - DNA, 15 bp, Homo sapiens
gggtcttctccctca

SEQ ID NO: 35779 - DNA, 15 bp, Homo sapiens
ggtcttctccctcaa

SEQ ID NO: 35780 - DNA, 15 bp, Homo sapiens
gtcttctccctcaag

SEQ ID NO: 35781 - DNA, 15 bp, Homo sapiens
tcttctccctcaagg

SEQ ID NO: 35782 - DNA, 15 bp, Homo sapiens
cttctccctcaaggc

SEQ ID NO: 35783 - DNA, 15 bp, Homo sapiens
ttctccctcaaggcc

SEQ ID NO: 35784 - DNA, 15 bp, Homo sapiens
tctccctcaaggccc

SEQ ID NO: 35785 - DNA, 15 bp, Homo sapiens
ctccctcaaggcccg

SEQ ID NO: 35786 - DNA, 15 bp, Homo sapiens
tccctcaaggcccgg

SEQ ID NO: 35787 - DNA, 15 bp, Homo sapiens
ccctcaaggcccggc

SEQ ID NO: 35788 - DNA, 15 bp, Homo sapiens
cctcaaggcccggcc

SEQ ID NO: 35789 - DNA, 15 bp, Homo sapiens
ctcaaggcccggcct

SEQ ID NO: 35790 - DNA, 15 bp, Homo sapiens
tcaaggcccggcctg

SEQ ID NO: 35791 - DNA, 15 bp, Homo sapiens
caaggcccggcctgg

SEQ ID NO: 35792 - DNA, 15 bp, Homo sapiens
aaggcccggcctggc

SEQ ID NO: 35793 - DNA, 15 bp, Homo sapiens
aggcccggcctggcc

SEQ ID NO: 35794 - DNA, 15 bp, Homo sapiens
ggcccggcctggcct

SEQ ID NO: 35795 - DNA, 15 bp, Homo sapiens
gcccggcctggcctc

SEQ ID NO: 35796 - DNA, 15 bp, Homo sapiens
cccggcctggcctcc

SEQ ID NO: 35797 - DNA, 15 bp, Homo sapiens
ccggcctggcctccc

SEQ ID NO: 35798 - DNA, 15 bp, Homo sapiens
cggcctggcctccca

SEQ ID NO: 35799 - DNA, 15 bp, Homo sapiens
ggcctggcctcccac

SEQ ID NO: 35800 - DNA, 15 bp, Homo sapiens
gcctggcctcccacc

SEQ ID NO: 35801 - DNA, 15 bp, Homo sapiens
cctggcctcccacct

SEQ ID NO: 35802 - DNA, 15 bp, Homo sapiens
ctggcctcccacctg

SEQ ID NO: 35803 - DNA, 15 bp, Homo sapiens
tggcctcccacctgg

SEQ ID NO: 35804 - DNA, 15 bp, Homo sapiens
ggcctcccacctggt

SEQ ID NO: 35805 - DNA, 15 bp, Homo sapiens
gcctcccacctggta

SEQ ID NO: 35806 - DNA, 15 bp, Homo sapiens
cctcccacctggtaa

SEQ ID NO: 35807 - DNA, 15 bp, Homo sapiens
ctcccacctggtaac

SEQ ID NO: 35808 - DNA, 15 bp, Homo sapiens
tcccacctggtaaca

SEQ ID NO: 35809 - DNA, 15 bp, Homo sapiens
cccacctggtaacac

SEQ ID NO: 35810 - DNA, 15 bp, Homo sapiens
ccacctggtaacacc

SEQ ID NO: 35811 - DNA, 15 bp, Homo sapiens
cacctggtaacacct

SEQ ID NO: 35812 - DNA, 15 bp, Homo sapiens
acctggtaacacctc

SEQ ID NO: 35813 - DNA, 15 bp, Homo sapiens
cctggtaacacctca

SEQ ID NO: 35814 - DNA, 15 bp, Homo sapiens
ctggtaacacctcag

SEQ ID NO: 35815 - DNA, 15 bp, Homo sapiens
tggtaacacctcagc

SEQ ID NO: 35816 - DNA, 15 bp, Homo sapiens
ggtaacacctcagcc

SEQ ID NO: 35817 - DNA, 15 bp, Homo sapiens
gtaacacctcagccc

SEQ ID NO: 35818 - DNA, 15 bp, Homo sapiens
taacacctcagcccg

SEQ ID NO: 35819 - DNA, 15 bp, Homo sapiens
aacacctcagcccgt

SEQ ID NO: 35820 - DNA, 15 bp, Homo sapiens
acacctcagcccgta

SEQ ID NO: 35821 - DNA, 15 bp, Homo sapiens
cacctcagcccgtac

SEQ ID NO: 35822 - DNA, 15 bp, Homo sapiens
acctcagcccgtacc

SEQ ID NO: 35823 - DNA, 15 bp, Homo sapiens
cctcagcccgtaccc

SEQ ID NO: 35824 - DNA, 15 bp, Homo sapiens
ctcagcccgtacccc

SEQ ID NO: 35825 - DNA, 15 bp, Homo sapiens
tcagcccgtacccca

SEQ ID NO: 35826 - DNA, 15 bp, Homo sapiens
cagcccgtaccccat

SEQ ID NO: 35827 - DNA, 15 bp, Homo sapiens
agcccgtaccccatg

SEQ ID NO: 35828 - DNA, 15 bp, Homo sapiens
gcccgtaccccatgg

SEQ ID NO: 35829 - DNA, 15 bp, Homo sapiens
cccgtaccccatggc

SEQ ID NO: 35830 - DNA, 15 bp, Homo sapiens
ccgtaccccatggct

SEQ ID NO: 35831 - DNA, 15 bp, Homo sapiens
cgtaccccatggctt

SEQ ID NO: 35832 - DNA, 15 bp, Homo sapiens
gtaccccatggcttc

SEQ ID NO: 35833 - DNA, 15 bp, Homo sapiens
taccccatggcttca

SEQ ID NO: 35834 - DNA, 15 bp, Homo sapiens
accccatggcttcac

SEQ ID NO: 35835 - DNA, 15 bp, Homo sapiens
ccccatggcttcaca

SEQ ID NO: 35836 - DNA, 15 bp, Homo sapiens
cccatggcttcacag

SEQ ID NO: 35837 - DNA, 15 bp, Homo sapiens
ccatggcttcacaga

SEQ ID NO: 35838 - DNA, 15 bp, Homo sapiens
catggcttcacagaa

SEQ ID NO: 35839 - DNA, 15 bp, Homo sapiens
atggcttcacagaac

SEQ ID NO: 35840 - DNA, 15 bp, Homo sapiens
tggcttcacagaacc

SEQ ID NO: 35841 - DNA, 15 bp, Homo sapiens
ggcttcacagaaccc

SEQ ID NO: 35842 - DNA, 15 bp, Homo sapiens
gcttcacagaacccc

SEQ ID NO: 35843 - DNA, 15 bp, Homo sapiens
cttcacagaaccccc

SEQ ID NO: 35844 - DNA, 15 bp, Homo sapiens
ttcacagaaccccca

SEQ ID NO: 35845 - DNA, 15 bp, Homo sapiens
tcacagaacccccaa

SEQ ID NO: 35846 - DNA, 15 bp, Homo sapiens
cacagaacccccaag

SEQ ID NO: 35847 - DNA, 15 bp, Homo sapiens
acagaacccccaagt

SEQ ID NO: 35848 - DNA, 15 bp, Homo sapiens
cagaacccccaagtc

SEQ ID NO: 35849 - DNA, 15 bp, Homo sapiens
agaacccccaagtcc

SEQ ID NO: 35850 - DNA, 15 bp, Homo sapiens
gaacccccaagtccc

SEQ ID NO: 35851 - DNA, 15 bp, Homo sapiens
aacccccaagtcccc

SEQ ID NO: 35852 - DNA, 15 bp, Homo sapiens
acccccaagtcccca

SEQ ID NO: 35853 - DNA, 15 bp, Homo sapiens
cccccaagtccccag

SEQ ID NO: 35854 - DNA, 15 bp, Homo sapiens
ccccaagtccccaga

SEQ ID NO: 35855 - DNA, 15 bp, Homo sapiens
cccaagtccccagat

SEQ ID NO: 35856 - DNA, 15 bp, Homo sapiens
ccaagtccccagatc

SEQ ID NO: 35857 - DNA, 15 bp, Homo sapiens
caagtccccagatcc

SEQ ID NO: 35858 - DNA, 15 bp, Homo sapiens
aagtccccagatcct

SEQ ID NO: 35859 - DNA, 15 bp, Homo sapiens
agtccccagatcctt

SEQ ID NO: 35860 - DNA, 15 bp, Homo sapiens
gtccccagatccttg

SEQ ID NO: 35861 - DNA, 15 bp, Homo sapiens
tccccagatccttgg

SEQ ID NO: 35862 - DNA, 15 bp, Homo sapiens
ccccagatccttggc

SEQ ID NO: 35863 - DNA, 15 bp, Homo sapiens
cccagatccttggct

SEQ ID NO: 35864 - DNA, 15 bp, Homo sapiens
ccagatccttggctg

SEQ ID NO: 35865 - DNA, 15 bp, Homo sapiens
cagatccttggctgt

SEQ ID NO: 35866 - DNA, 15 bp, Homo sapiens
agatccttggctgtg

SEQ ID NO: 35867 - DNA, 15 bp, Homo sapiens
gatccttggctgtga

SEQ ID NO: 35868 - DNA, 15 bp, Homo sapiens
atccttggctgtgag

SEQ ID NO: 35869 - DNA, 15 bp, Homo sapiens
tccttggctgtgagc

SEQ ID NO: 35870 - DNA, 15 bp, Homo sapiens
ccttggctgtgagca

SEQ ID NO: 35871 - DNA, 15 bp, Homo sapiens
cttggctgtgagcag

SEQ ID NO: 35872 - DNA, 15 bp, Homo sapiens
ttggctgtgagcagt

SEQ ID NO: 35873 - DNA, 15 bp, Homo sapiens
tggctgtgagcagtg

SEQ ID NO: 35874 - DNA, 15 bp, Homo sapiens
ggctgtgagcagtgt

SEQ ID NO: 35875 - DNA, 15 bp, Homo sapiens
gctgtgagcagtgta

SEQ ID NO: 35876 - DNA, 15 bp, Homo sapiens
ctgtgagcagtgtag

SEQ ID NO: 35877 - DNA, 15 bp, Homo sapiens
tgtgagcagtgtagg

SEQ ID NO: 35878 - DNA, 15 bp, Homo sapiens
gtgagcagtgtaggc

SEQ ID NO: 35879 - DNA, 15 bp, Homo sapiens
tgagcagtgtaggct

SEQ ID NO: 35880 - DNA, 15 bp, Homo sapiens
gagcagtgtaggcta

SEQ ID NO: 35881 - DNA, 15 bp, Homo sapiens
agcagtgtaggctat

SEQ ID NO: 35882 - DNA, 15 bp, Homo sapiens
gcagtgtaggctatt

SEQ ID NO: 35883 - DNA, 15 bp, Homo sapiens
cagtgtaggctattc

SEQ ID NO: 35884 - DNA, 15 bp, Homo sapiens
agtgtaggctattct

SEQ ID NO: 35885 - DNA, 15 bp, Homo sapiens
gtgtaggctattctg

SEQ ID NO: 35886 - DNA, 15 bp, Homo sapiens
tgtaggctattctga

SEQ ID NO: 35887 - DNA, 15 bp, Homo sapiens
gtaggctattctgaa

SEQ ID NO: 35888 - DNA, 15 bp, Homo sapiens
taggctattctgaat

SEQ ID NO: 35889 - DNA, 15 bp, Homo sapiens
aggctattctgaatt

SEQ ID NO: 35890 - DNA, 15 bp, Homo sapiens
ggctattctgaattg

SEQ ID NO: 35891 - DNA, 15 bp, Homo sapiens
gctattctgaattgc

SEQ ID NO: 35892 - DNA, 15 bp, Homo sapiens
ctattctgaattgca

SEQ ID NO: 35893 - DNA, 15 bp, Homo sapiens
tattctgaattgcag

SEQ ID NO: 35894 - DNA, 15 bp, Homo sapiens
attctgaattgcagt

SEQ ID NO: 35895 - DNA, 15 bp, Homo sapiens
ttctgaattgcagta

SEQ ID NO: 35896 - DNA, 15 bp, Homo sapiens
tctgaattgcagtac

SEQ ID NO: 35897 - DNA, 15 bp, Homo sapiens
ctgaattgcagtact

SEQ ID NO: 35898 - DNA, 15 bp, Homo sapiens
tgaattgcagtactc

SEQ ID NO: 35899 - DNA, 15 bp, Homo sapiens
gaattgcagtactct

SEQ ID NO: 35900 - DNA, 15 bp, Homo sapiens
aattgcagtactctg

SEQ ID NO: 35901 - DNA, 15 bp, Homo sapiens
attgcagtactctgg

SEQ ID NO: 35902 - DNA, 15 bp, Homo sapiens
ttgcagtactctggg

SEQ ID NO: 35903 - DNA, 15 bp, Homo sapiens
tgcagtactctgggg

SEQ ID NO: 35904 - DNA, 15 bp, Homo sapiens
gcagtactctggggg

SEQ ID NO: 35905 - DNA, 15 bp, Homo sapiens
cagtactctgggggt

SEQ ID NO: 35906 - DNA, 15 bp, Homo sapiens
agtactctgggggtc

SEQ ID NO: 35907 - DNA, 15 bp, Homo sapiens
gtactctgggggtca

SEQ ID NO: 35908 - DNA, 15 bp, Homo sapiens
tactctgggggtcaa

SEQ ID NO: 35909 - DNA, 15 bp, Homo sapiens
actctgggggtcaaa

SEQ ID NO: 35910 - DNA, 15 bp, Homo sapiens
ctctgggggtcaaag

SEQ ID NO: 35911 - DNA, 15 bp, Homo sapiens
tctgggggtcaaagg

SEQ ID NO: 35912 - DNA, 15 bp, Homo sapiens
ctgggggtcaaaggt

SEQ ID NO: 35913 - DNA, 15 bp, Homo sapiens
tgggggtcaaaggtg

SEQ ID NO: 35914 - DNA, 15 bp, Homo sapiens
gggggtcaaaggtgt

SEQ ID NO: 35915 - DNA, 15 bp, Homo sapiens
ggggtcaaaggtgtc

SEQ ID NO: 35916 - DNA, 15 bp, Homo sapiens
gggtcaaaggtgtca

SEQ ID NO: 35917 - DNA, 15 bp, Homo sapiens
ggtcaaaggtgtcag

SEQ ID NO: 35918 - DNA, 15 bp, Homo sapiens
gtcaaaggtgtcagg

SEQ ID NO: 35919 - DNA, 15 bp, Homo sapiens
tcaaaggtgtcaggt

SEQ ID NO: 35920 - DNA, 15 bp, Homo sapiens
caaaggtgtcaggtc

SEQ ID NO: 35921 - DNA, 15 bp, Homo sapiens
aaaggtgtcaggtct

SEQ ID NO: 35922 - DNA, 15 bp, Homo sapiens
aaggtgtcaggtctc

SEQ ID NO: 35923 - DNA, 15 bp, Homo sapiens
aggtgtcaggtctca

SEQ ID NO: 35924 - DNA, 15 bp, Homo sapiens
ggtgtcaggtctcag

SEQ ID NO: 35925 - DNA, 15 bp, Homo sapiens
gtgtcaggtctcaga

SEQ ID NO: 35926 - DNA, 15 bp, Homo sapiens
tgtcaggtctcagag

SEQ ID NO: 35927 - DNA, 15 bp, Homo sapiens
gtcaggtctcagagg

SEQ ID NO: 35928 - DNA, 15 bp, Homo sapiens
tcaggtctcagaggc

SEQ ID NO: 35929 - DNA, 15 bp, Homo sapiens
caggtctcagaggct

SEQ ID NO: 35930 - DNA, 15 bp, Homo sapiens
aggtctcagaggctt

SEQ ID NO: 35931 - DNA, 15 bp, Homo sapiens
ggtctcagaggcttg

SEQ ID NO: 35932 - DNA, 15 bp, Homo sapiens
gtctcagaggcttgg

SEQ ID NO: 35933 - DNA, 15 bp, Homo sapiens
tctcagaggcttgga

SEQ ID NO: 35934 - DNA, 15 bp, Homo sapiens
ctcagaggcttggaa

SEQ ID NO: 35935 - DNA, 15 bp, Homo sapiens
tcagaggcttggaaa

SEQ ID NO: 35936 - DNA, 15 bp, Homo sapiens
cagaggcttggaaac

SEQ ID NO: 35937 - DNA, 15 bp, Homo sapiens
agaggcttggaaact

SEQ ID NO: 35938 - DNA, 15 bp, Homo sapiens
gaggcttggaaactc

SEQ ID NO: 35939 - DNA, 15 bp, Homo sapiens
aggcttggaaactcc

SEQ ID NO: 35940 - DNA, 15 bp, Homo sapiens
ggcttggaaactcca

SEQ ID NO: 35941 - DNA, 15 bp, Homo sapiens
gcttggaaactccac

SEQ ID NO: 35942 - DNA, 15 bp, Homo sapiens
cttggaaactccacc

SEQ ID NO: 35943 - DNA, 15 bp, Homo sapiens
ttggaaactccaccc

SEQ ID NO: 35944 - DNA, 15 bp, Homo sapiens
tggaaactccaccct

SEQ ID NO: 35945 - DNA, 15 bp, Homo sapiens
ggaaactccaccctc

SEQ ID NO: 35946 - DNA, 15 bp, Homo sapiens
gaaactccaccctcc

SEQ ID NO: 35947 - DNA, 15 bp, Homo sapiens
aaactccaccctcca

SEQ ID NO: 35948 - DNA, 15 bp, Homo sapiens
aactccaccctccaa

SEQ ID NO: 35949 - DNA, 15 bp, Homo sapiens
actccaccctccaaa

SEQ ID NO: 35950 - DNA, 15 bp, Homo sapiens
ctccaccctccaaaa

SEQ ID NO: 35951 - DNA, 15 bp, Homo sapiens
tccaccctccaaaaa

SEQ ID NO: 35952 - DNA, 15 bp, Homo sapiens
ccaccctccaaaaaa

SEQ ID NO: 35953 - DNA, 15 bp, Homo sapiens
caccctccaaaaaac

SEQ ID NO: 35954 - DNA, 15 bp, Homo sapiens
accctccaaaaaacg

SEQ ID NO: 35955 - DNA, 15 bp, Homo sapiens
ccctccaaaaaacgt

SEQ ID NO: 35956 - DNA, 15 bp, Homo sapiens
cctccaaaaaacgtc

SEQ ID NO: 35957 - DNA, 15 bp, Homo sapiens
ctccaaaaaacgtca

SEQ ID NO: 35958 - DNA, 15 bp, Homo sapiens
tccaaaaaacgtcag

SEQ ID NO: 35959 - DNA, 15 bp, Homo sapiens
ccaaaaaacgtcagg

SEQ ID NO: 35960 - DNA, 15 bp, Homo sapiens
caaaaaacgtcaggt

SEQ ID NO: 35961 - DNA, 15 bp, Homo sapiens
aaaaaacgtcaggtg

SEQ ID NO: 35962 - DNA, 15 bp, Homo sapiens
aaaaacgtcaggtgc

SEQ ID NO: 35963 - DNA, 15 bp, Homo sapiens
aaaacgtcaggtgca

SEQ ID NO: 35964 - DNA, 15 bp, Homo sapiens
aaacgtcaggtgcag

SEQ ID NO: 35965 - DNA, 15 bp, Homo sapiens
aacgtcaggtgcaga

SEQ ID NO: 35966 - DNA, 15 bp, Homo sapiens
acgtcaggtgcagaa

SEQ ID NO: 35967 - DNA, 15 bp, Homo sapiens
cgtcaggtgcagaac

SEQ ID NO: 35968 - DNA, 15 bp, Homo sapiens
gtcaggtgcagaacc

SEQ ID NO: 35969 - DNA, 15 bp, Homo sapiens
tcaggtgcagaacct

SEQ ID NO: 35970 - DNA, 15 bp, Homo sapiens
caggtgcagaacctt

SEQ ID NO: 35971 - DNA, 15 bp, Homo sapiens
aggtgcagaacctta

SEQ ID NO: 35972 - DNA, 15 bp, Homo sapiens
ggtgcagaaccttaa

SEQ ID NO: 35973 - DNA, 15 bp, Homo sapiens
gtgcagaaccttaaa

SEQ ID NO: 35974 - DNA, 15 bp, Homo sapiens
tgcagaaccttaaag

SEQ ID NO: 35975 - DNA, 15 bp, Homo sapiens
gcagaaccttaaaga

SEQ ID NO: 35976 - DNA, 15 bp, Homo sapiens
cagaaccttaaagat

SEQ ID NO: 35977 - DNA, 15 bp, Homo sapiens
agaaccttaaagatg

SEQ ID NO: 35978 - DNA, 15 bp, Homo sapiens
gaaccttaaagatgc

SEQ ID NO: 35979 - DNA, 15 bp, Homo sapiens
aaccttaaagatgca

SEQ ID NO: 35980 - DNA, 15 bp, Homo sapiens
accttaaagatgcag

SEQ ID NO: 35981 - DNA, 15 bp, Homo sapiens
ccttaaagatgcaga

SEQ ID NO: 35982 - DNA, 15 bp, Homo sapiens
cttaaagatgcagaa

SEQ ID NO: 35983 - DNA, 15 bp, Homo sapiens
ttaaagatgcagaat

SEQ ID NO: 35984 - DNA, 15 bp, Homo sapiens
taaagatgcagaatg

SEQ ID NO: 35985 - DNA, 15 bp, Homo sapiens
aaagatgcagaatgt

SEQ ID NO: 35986 - DNA, 15 bp, Homo sapiens
aagatgcagaatgtc

SEQ ID NO: 35987 - DNA, 15 bp, Homo sapiens
agatgcagaatgtca

SEQ ID NO: 35988 - DNA, 15 bp, Homo sapiens
gatgcagaatgtcaa

SEQ ID NO: 35989 - DNA, 15 bp, Homo sapiens
atgcagaatgtcaaa

SEQ ID NO: 35990 - DNA, 15 bp, Homo sapiens
tgcagaatgtcaaaa

SEQ ID NO: 35991 - DNA, 15 bp, Homo sapiens
gcagaatgtcaaaat

SEQ ID NO: 35992 - DNA, 15 bp, Homo sapiens
cagaatgtcaaaatc

SEQ ID NO: 35993 - DNA, 15 bp, Homo sapiens
agaatgtcaaaatca

SEQ ID NO: 35994 - DNA, 15 bp, Homo sapiens
gaatgtcaaaatcac

SEQ ID NO: 35995 - DNA, 15 bp, Homo sapiens
aatgtcaaaatcaca

SEQ ID NO: 35996 - DNA, 15 bp, Homo sapiens
atgtcaaaatcacaa

SEQ ID NO: 35997 - DNA, 15 bp, Homo sapiens
tgtcaaaatcacaaa

SEQ ID NO: 35998 - DNA, 15 bp, Homo sapiens
gtcaaaatcacaaaa

SEQ ID NO: 35999 - DNA, 15 bp, Homo sapiens
tcaaaatcacaaaac

SEQ ID NO: 36000 - DNA, 15 bp, Homo sapiens
caaaatcacaaaacc

SEQ ID NO: 36001 - DNA, 15 bp, Homo sapiens
aaaatcacaaaacca

SEQ ID NO: 36002 - DNA, 15 bp, Homo sapiens
aaatcacaaaaccac

SEQ ID NO: 36003 - DNA, 15 bp, Homo sapiens
aatcacaaaaccaca

SEQ ID NO: 36004 - DNA, 15 bp, Homo sapiens
atcacaaaaccacag

SEQ ID NO: 36005 - DNA, 15 bp, Homo sapiens
tcacaaaaccacaga

SEQ ID NO: 36006 - DNA, 15 bp, Homo sapiens
cacaaaaccacagag

SEQ ID NO: 36007 - DNA, 15 bp, Homo sapiens
acaaaaccacagagc

SEQ ID NO: 36008 - DNA, 15 bp, Homo sapiens
caaaaccacagagct

SEQ ID NO: 36009 - DNA, 15 bp, Homo sapiens
aaaaccacagagctt

SEQ ID NO: 36010 - DNA, 15 bp, Homo sapiens
aaaccacagagcttt

SEQ ID NO: 36011 - DNA, 15 bp, Homo sapiens
aaccacagagcttta

SEQ ID NO: 36012 - DNA, 15 bp, Homo sapiens
accacagagctttac

SEQ ID NO: 36013 - DNA, 15 bp, Homo sapiens
ccacagagctttaca

SEQ ID NO: 36014 - DNA, 15 bp, Homo sapiens
cacagagctttacaa

SEQ ID NO: 36015 - DNA, 15 bp, Homo sapiens
acagagctttacaaa

SEQ ID NO: 36016 - DNA, 15 bp, Homo sapiens
cagagctttacaaag

SEQ ID NO: 36017 - DNA, 15 bp, Homo sapiens
agagctttacaaagc

SEQ ID NO: 36018 - DNA, 15 bp, Homo sapiens
gagctttacaaagct

SEQ ID NO: 36019 - DNA, 15 bp, Homo sapiens
agctttacaaagcta

SEQ ID NO: 36020 - DNA, 15 bp, Homo sapiens
gctttacaaagctag

SEQ ID NO: 36021 - DNA, 15 bp, Homo sapiens
ctttacaaagctagt

SEQ ID NO: 36022 - DNA, 15 bp, Homo sapiens
tttacaaagctagtc

SEQ ID NO: 36023 - DNA, 15 bp, Homo sapiens
ttacaaagctagtca

SEQ ID NO: 36024 - DNA, 15 bp, Homo sapiens
tacaaagctagtcaa

SEQ ID NO: 36025 - DNA, 15 bp, Homo sapiens
acaaagctagtcaaa

SEQ ID NO: 36026 - DNA, 15 bp, Homo sapiens
caaagctagtcaaaa

SEQ ID NO: 36027 - DNA, 15 bp, Homo sapiens
aaagctagtcaaaat

SEQ ID NO: 36028 - DNA, 15 bp, Homo sapiens
aagctagtcaaaatg

SEQ ID NO: 36029 - DNA, 15 bp, Homo sapiens
agctagtcaaaatgt

SEQ ID NO: 36030 - DNA, 15 bp, Homo sapiens
gctagtcaaaatgtc

SEQ ID NO: 36031 - DNA, 15 bp, Homo sapiens
ctagtcaaaatgtca

SEQ ID NO: 36032 - DNA, 15 bp, Homo sapiens
tagtcaaaatgtcag

SEQ ID NO: 36033 - DNA, 15 bp, Homo sapiens
agtcaaaatgtcagc

SEQ ID NO: 36034 - DNA, 15 bp, Homo sapiens
gtcaaaatgtcagca

SEQ ID NO: 36035 - DNA, 15 bp, Homo sapiens
tcaaaatgtcagcac

SEQ ID NO: 36036 - DNA, 15 bp, Homo sapiens
caaaatgtcagcacc

SEQ ID NO: 36037 - DNA, 15 bp, Homo sapiens
aaaatgtcagcacct

SEQ ID NO: 36038 - DNA, 15 bp, Homo sapiens
aaatgtcagcacctg

SEQ ID NO: 36039 - DNA, 15 bp, Homo sapiens
aatgtcagcacctgc

SEQ ID NO: 36040 - DNA, 15 bp, Homo sapiens
atgtcagcacctgcg

SEQ ID NO: 36041 - DNA, 15 bp, Homo sapiens
tgtcagcacctgcga

SEQ ID NO: 36042 - DNA, 15 bp, Homo sapiens
gtcagcacctgcgaa

SEQ ID NO: 36043 - DNA, 15 bp, Homo sapiens
tcagcacctgcgaat

SEQ ID NO: 36044 - DNA, 15 bp, Homo sapiens
cagcacctgcgaatg

SEQ ID NO: 36045 - DNA, 15 bp, Homo sapiens
agcacctgcgaatgg

SEQ ID NO: 36046 - DNA, 15 bp, Homo sapiens
gcacctgcgaatggc

SEQ ID NO: 36047 - DNA, 15 bp, Homo sapiens
cacctgcgaatggcc

SEQ ID NO: 36048 - DNA, 15 bp, Homo sapiens
acctgcgaatggccg

SEQ ID NO: 36049 - DNA, 15 bp, Homo sapiens
cctgcgaatggccgt

SEQ ID NO: 36050 - DNA, 15 bp, Homo sapiens
ctgcgaatggccgtc

SEQ ID NO: 36051 - DNA, 15 bp, Homo sapiens
tgcgaatggccgtct

SEQ ID NO: 36052 - DNA, 15 bp, Homo sapiens
gcgaatggccgtctt

SEQ ID NO: 36053 - DNA, 15 bp, Homo sapiens
cgaatggccgtcttt

SEQ ID NO: 36054 - DNA, 15 bp, Homo sapiens
gaatggccgtcttta

SEQ ID NO: 36055 - DNA, 15 bp, Homo sapiens
aatggccgtctttaa

SEQ ID NO: 36056 - DNA, 15 bp, Homo sapiens
atggccgtctttaag

SEQ ID NO: 36057 - DNA, 15 bp, Homo sapiens
tggccgtctttaagc

SEQ ID NO: 36058 - DNA, 15 bp, Homo sapiens
ggccgtctttaagct

SEQ ID NO: 36059 - DNA, 15 bp, Homo sapiens
gccgtctttaagctt

SEQ ID NO: 36060 - DNA, 15 bp, Homo sapiens
ccgtctttaagcttc

SEQ ID NO: 36061 - DNA, 15 bp, Homo sapiens
cgtctttaagcttct

SEQ ID NO: 36062 - DNA, 15 bp, Homo sapiens
gtctttaagcttctc

SEQ ID NO: 36063 - DNA, 15 bp, Homo sapiens
tctttaagcttctct

SEQ ID NO: 36064 - DNA, 15 bp, Homo sapiens
ctttaagcttctctg

SEQ ID NO: 36065 - DNA, 15 bp, Homo sapiens
tttaagcttctctgc

SEQ ID NO: 36066 - DNA, 15 bp, Homo sapiens
ttaagcttctctgcc

SEQ ID NO: 36067 - DNA, 15 bp, Homo sapiens
taagcttctctgcca

SEQ ID NO: 36068 - DNA, 15 bp, Homo sapiens
aagcttctctgccag

SEQ ID NO: 36069 - DNA, 15 bp, Homo sapiens
agcttctctgccaga

SEQ ID NO: 36070 - DNA, 15 bp, Homo sapiens
gcttctctgccagaa

SEQ ID NO: 36071 - DNA, 15 bp, Homo sapiens
cttctctgccagaag

SEQ ID NO: 36072 - DNA, 15 bp, Homo sapiens
ttctctgccagaagc

SEQ ID NO: 36073 - DNA, 15 bp, Homo sapiens
tctctgccagaagcc

SEQ ID NO: 36074 - DNA, 15 bp, Homo sapiens
ctctgccagaagcct

SEQ ID NO: 36075 - DNA, 15 bp, Homo sapiens
tctgccagaagcctg

SEQ ID NO: 36076 - DNA, 15 bp, Homo sapiens
ctgccagaagcctgg

SEQ ID NO: 36077 - DNA, 15 bp, Homo sapiens
tgccagaagcctggg

SEQ ID NO: 36078 - DNA, 15 bp, Homo sapiens
gccagaagcctggga

SEQ ID NO: 36079 - DNA, 15 bp, Homo sapiens
ccagaagcctgggac

SEQ ID NO: 36080 - DNA, 15 bp, Homo sapiens
cagaagcctgggact

SEQ ID NO: 36081 - DNA, 15 bp, Homo sapiens
agaagcctgggactt

SEQ ID NO: 36082 - DNA, 15 bp, Homo sapiens
gaagcctgggacttt

SEQ ID NO: 36083 - DNA, 15 bp, Homo sapiens
aagcctgggactttg

SEQ ID NO: 36084 - DNA, 15 bp, Homo sapiens
agcctgggactttgg

SEQ ID NO: 36085 - DNA, 15 bp, Homo sapiens
gcctgggactttggg

SEQ ID NO: 36086 - DNA, 15 bp, Homo sapiens
cctgggactttgggg

SEQ ID NO: 36087 - DNA, 15 bp, Homo sapiens
ctgggactttgggga

SEQ ID NO: 36088 - DNA, 15 bp, Homo sapiens
tgggactttggggac

SEQ ID NO: 36089 - DNA, 15 bp, Homo sapiens
gggactttggggaca

SEQ ID NO: 36090 - DNA, 15 bp, Homo sapiens
ggactttggggacag

SEQ ID NO: 36091 - DNA, 15 bp, Homo sapiens
gactttggggacagc

SEQ ID NO: 36092 - DNA, 15 bp, Homo sapiens
actttggggacagca

SEQ ID NO: 36093 - DNA, 15 bp, Homo sapiens
ctttggggacagcag

SEQ ID NO: 36094 - DNA, 15 bp, Homo sapiens
tttggggacagcaga

SEQ ID NO: 36095 - DNA, 15 bp, Homo sapiens
ttggggacagcagag

SEQ ID NO: 36096 - DNA, 15 bp, Homo sapiens
tggggacagcagagc

SEQ ID NO: 36097 - DNA, 15 bp, Homo sapiens
ggggacagcagagcc

SEQ ID NO: 36098 - DNA, 15 bp, Homo sapiens
gggacagcagagccc

SEQ ID NO: 36099 - DNA, 15 bp, Homo sapiens
ggacagcagagcccc

SEQ ID NO: 36100 - DNA, 15 bp, Homo sapiens
gacagcagagccccc

SEQ ID NO: 36101 - DNA, 15 bp, Homo sapiens
acagcagagccccct

SEQ ID NO: 36102 - DNA, 15 bp, Homo sapiens
cagcagagccccctg

SEQ ID NO: 36103 - DNA, 15 bp, Homo sapiens
agcagagccccctgg

SEQ ID NO: 36104 - DNA, 15 bp, Homo sapiens
gcagagccccctggg

SEQ ID NO: 36105 - DNA, 15 bp, Homo sapiens
cagagccccctggga

SEQ ID NO: 36106 - DNA, 15 bp, Homo sapiens
agagccccctgggag

SEQ ID NO: 36107 - DNA, 15 bp, Homo sapiens
gagccccctgggagt

SEQ ID NO: 36108 - DNA, 15 bp, Homo sapiens
agccccctgggagtc

SEQ ID NO: 36109 - DNA, 15 bp, Homo sapiens
gccccctgggagtca

SEQ ID NO: 36110 - DNA, 15 bp, Homo sapiens
ccccctgggagtcag

SEQ ID NO: 36111 - DNA, 15 bp, Homo sapiens
cccctgggagtcagg

SEQ ID NO: 36112 - DNA, 15 bp, Homo sapiens
ccctgggagtcaggg

SEQ ID NO: 36113 - DNA, 15 bp, Homo sapiens
cctgggagtcagggt

SEQ ID NO: 36114 - DNA, 15 bp, Homo sapiens
ctgggagtcagggtt

SEQ ID NO: 36115 - DNA, 15 bp, Homo sapiens
tgggagtcagggttt

SEQ ID NO: 36116 - DNA, 15 bp, Homo sapiens
gggagtcagggtttt

SEQ ID NO: 36117 - DNA, 15 bp, Homo sapiens
ggagtcagggttttc

SEQ ID NO: 36118 - DNA, 15 bp, Homo sapiens
gagtcagggttttcg

SEQ ID NO: 36119 - DNA, 15 bp, Homo sapiens
agtcagggttttcga

SEQ ID NO: 36120 - DNA, 15 bp, Homo sapiens
gtcagggttttcgag

SEQ ID NO: 36121 - DNA, 15 bp, Homo sapiens
tcagggttttcgagg

SEQ ID NO: 36122 - DNA, 15 bp, Homo sapiens
cagggttttcgaggc

SEQ ID NO: 36123 - DNA, 15 bp, Homo sapiens
agggttttcgaggct

SEQ ID NO: 36124 - DNA, 15 bp, Homo sapiens
gggttttcgaggctc

SEQ ID NO: 36125 - DNA, 15 bp, Homo sapiens
ggttttcgaggctca

SEQ ID NO: 36126 - DNA, 15 bp, Homo sapiens
gttttcgaggctcag

SEQ ID NO: 36127 - DNA, 15 bp, Homo sapiens
ttttcgaggctcagg

SEQ ID NO: 36128 - DNA, 15 bp, Homo sapiens
tttcgaggctcagga

SEQ ID NO: 36129 - DNA, 15 bp, Homo sapiens
ttcgaggctcaggag

SEQ ID NO: 36130 - DNA, 15 bp, Homo sapiens
tcgaggctcaggagg

SEQ ID NO: 36131 - DNA, 15 bp, Homo sapiens
cgaggctcaggaggg

SEQ ID NO: 36132 - DNA, 15 bp, Homo sapiens
gaggctcaggagggt

SEQ ID NO: 36133 - DNA, 15 bp, Homo sapiens
aggctcaggagggtg

SEQ ID NO: 36134 - DNA, 15 bp, Homo sapiens
ggctcaggagggtgg

SEQ ID NO: 36135 - DNA, 15 bp, Homo sapiens
gctcaggagggtggg

SEQ ID NO: 36136 - DNA, 15 bp, Homo sapiens
ctcaggagggtggga

SEQ ID NO: 36137 - DNA, 15 bp, Homo sapiens
tcaggagggtgggaa

SEQ ID NO: 36138 - DNA, 15 bp, Homo sapiens
caggagggtgggaag

SEQ ID NO: 36139 - DNA, 15 bp, Homo sapiens
aggagggtgggaagc

SEQ ID NO: 36140 - DNA, 15 bp, Homo sapiens
ggagggtgggaagct

SEQ ID NO: 36141 - DNA, 15 bp, Homo sapiens
gagggtgggaagctc

SEQ ID NO: 36142 - DNA, 15 bp, Homo sapiens
agggtgggaagctca

SEQ ID NO: 36143 - DNA, 15 bp, Homo sapiens
gggtgggaagctcaa

SEQ ID NO: 36144 - DNA, 15 bp, Homo sapiens
ggtgggaagctcaaa

SEQ ID NO: 36145 - DNA, 15 bp, Homo sapiens
gtgggaagctcaaaa

SEQ ID NO: 36146 - DNA, 15 bp, Homo sapiens
tgggaagctcaaaat

SEQ ID NO: 36147 - DNA, 15 bp, Homo sapiens
gggaagctcaaaatg

SEQ ID NO: 36148 - DNA, 15 bp, Homo sapiens
ggaagctcaaaatga

SEQ ID NO: 36149 - DNA, 15 bp, Homo sapiens
gaagctcaaaatgag

SEQ ID NO: 36150 - DNA, 15 bp, Homo sapiens
aagctcaaaatgaga

SEQ ID NO: 36151 - DNA, 15 bp, Homo sapiens
agctcaaaatgagag

SEQ ID NO: 36152 - DNA, 15 bp, Homo sapiens
gctcaaaatgagagg

SEQ ID NO: 36153 - DNA, 15 bp, Homo sapiens
ctcaaaatgagaggc

SEQ ID NO: 36154 - DNA, 15 bp, Homo sapiens
tcaaaatgagaggcc

SEQ ID NO: 36155 - DNA, 15 bp, Homo sapiens
caaaatgagaggcct

SEQ ID NO: 36156 - DNA, 15 bp, Homo sapiens
aaaatgagaggcctt

SEQ ID NO: 36157 - DNA, 15 bp, Homo sapiens
aaatgagaggccttg

SEQ ID NO: 36158 - DNA, 15 bp, Homo sapiens
aatgagaggccttgt

SEQ ID NO: 36159 - DNA, 15 bp, Homo sapiens
atgagaggccttgtg

SEQ ID NO: 36160 - DNA, 15 bp, Homo sapiens
tgagaggccttgtgg

SEQ ID NO: 36161 - DNA, 15 bp, Homo sapiens
gagaggccttgtggg

SEQ ID NO: 36162 - DNA, 15 bp, Homo sapiens
agaggccttgtgggc

SEQ ID NO: 36163 - DNA, 15 bp, Homo sapiens
gaggccttgtgggcc

SEQ ID NO: 36164 - DNA, 15 bp, Homo sapiens
aggccttgtgggcca

SEQ ID NO: 36165 - DNA, 15 bp, Homo sapiens
ggccttgtgggccaa

SEQ ID NO: 36166 - DNA, 15 bp, Homo sapiens
gccttgtgggccaag

SEQ ID NO: 36167 - DNA, 15 bp, Homo sapiens
ccttgtgggccaagc

SEQ ID NO: 36168 - DNA, 15 bp, Homo sapiens
cttgtgggccaagct

SEQ ID NO: 36169 - DNA, 15 bp, Homo sapiens
ttgtgggccaagctc

SEQ ID NO: 36170 - DNA, 15 bp, Homo sapiens
tgtgggccaagctcc

SEQ ID NO: 36171 - DNA, 15 bp, Homo sapiens
gtgggccaagctcca

SEQ ID NO: 36172 - DNA, 15 bp, Homo sapiens
tgggccaagctccag

SEQ ID NO: 36173 - DNA, 15 bp, Homo sapiens
gggccaagctccaga

SEQ ID NO: 36174 - DNA, 15 bp, Homo sapiens
ggccaagctccagag

SEQ ID NO: 36175 - DNA, 15 bp, Homo sapiens
gccaagctccagagc

SEQ ID NO: 36176 - DNA, 15 bp, Homo sapiens
ccaagctccagagcc

SEQ ID NO: 36177 - DNA, 15 bp, Homo sapiens
caagctccagagccc

SEQ ID NO: 36178 - DNA, 15 bp, Homo sapiens
aagctccagagccca

SEQ ID NO: 36179 - DNA, 15 bp, Homo sapiens
agctccagagcccag

SEQ ID NO: 36180 - DNA, 15 bp, Homo sapiens
gctccagagcccagc

SEQ ID NO: 36181 - DNA, 15 bp, Homo sapiens
ctccagagcccagcc

SEQ ID NO: 36182 - DNA, 15 bp, Homo sapiens
tccagagcccagccc

SEQ ID NO: 36183 - DNA, 15 bp, Homo sapiens
ccagagcccagccca

SEQ ID NO: 36184 - DNA, 15 bp, Homo sapiens
cagagcccagcccac

SEQ ID NO: 36185 - DNA, 15 bp, Homo sapiens
agagcccagcccaca

SEQ ID NO: 36186 - DNA, 15 bp, Homo sapiens
gagcccagcccacag

SEQ ID NO: 36187 - DNA, 15 bp, Homo sapiens
agcccagcccacagc

SEQ ID NO: 36188 - DNA, 15 bp, Homo sapiens
gcccagcccacagcc

SEQ ID NO: 36189 - DNA, 15 bp, Homo sapiens
cccagcccacagcct

SEQ ID NO: 36190 - DNA, 15 bp, Homo sapiens
ccagcccacagcctc

SEQ ID NO: 36191 - DNA, 15 bp, Homo sapiens
cagcccacagcctcc

SEQ ID NO: 36192 - DNA, 15 bp, Homo sapiens
agcccacagcctcca

SEQ ID NO: 36193 - DNA, 15 bp, Homo sapiens
gcccacagcctccat

SEQ ID NO: 36194 - DNA, 15 bp, Homo sapiens
cccacagcctccata

SEQ ID NO: 36195 - DNA, 15 bp, Homo sapiens
ccacagcctccatag

SEQ ID NO: 36196 - DNA, 15 bp, Homo sapiens
cacagcctccatagg

SEQ ID NO: 36197 - DNA, 15 bp, Homo sapiens
acagcctccataggt

SEQ ID NO: 36198 - DNA, 15 bp, Homo sapiens
cagcctccataggtg

SEQ ID NO: 36199 - DNA, 15 bp, Homo sapiens
agcctccataggtgc

SEQ ID NO: 36200 - DNA, 15 bp, Homo sapiens
gcctccataggtgcc

SEQ ID NO: 36201 - DNA, 15 bp, Homo sapiens
cctccataggtgccc

SEQ ID NO: 36202 - DNA, 15 bp, Homo sapiens
ctccataggtgccct

SEQ ID NO: 36203 - DNA, 15 bp, Homo sapiens
tccataggtgccctg

SEQ ID NO: 36204 - DNA, 15 bp, Homo sapiens
ccataggtgccctgt

SEQ ID NO: 36205 - DNA, 15 bp, Homo sapiens
cataggtgccctgtc

SEQ ID NO: 36206 - DNA, 15 bp, Homo sapiens
ataggtgccctgtcc

SEQ ID NO: 36207 - DNA, 15 bp, Homo sapiens
taggtgccctgtccc

SEQ ID NO: 36208 - DNA, 15 bp, Homo sapiens
aggtgccctgtcccc

SEQ ID NO: 36209 - DNA, 15 bp, Homo sapiens
ggtgccctgtcccca

SEQ ID NO: 36210 - DNA, 15 bp, Homo sapiens
gtgccctgtccccac

SEQ ID NO: 36211 - DNA, 15 bp, Homo sapiens
tgccctgtccccacc

SEQ ID NO: 36212 - DNA, 15 bp, Homo sapiens
gccctgtccccaccc

SEQ ID NO: 36213 - DNA, 15 bp, Homo sapiens
ccctgtccccaccca

SEQ ID NO: 36214 - DNA, 15 bp, Homo sapiens
cctgtccccacccac

SEQ ID NO: 36215 - DNA, 15 bp, Homo sapiens
ctgtccccacccaca

SEQ ID NO: 36216 - DNA, 15 bp, Homo sapiens
tgtccccacccacag

SEQ ID NO: 36217 - DNA, 15 bp, Homo sapiens
gtccccacccacagg

SEQ ID NO: 36218 - DNA, 15 bp, Homo sapiens
tccccacccacaggg

SEQ ID NO: 36219 - DNA, 15 bp, Homo sapiens
ccccacccacaggga

SEQ ID NO: 36220 - DNA, 15 bp, Homo sapiens
cccacccacagggat

SEQ ID NO: 36221 - DNA, 15 bp, Homo sapiens
ccacccacagggatc

SEQ ID NO: 36222 - DNA, 15 bp, Homo sapiens
cacccacagggatca

SEQ ID NO: 36223 - DNA, 15 bp, Homo sapiens
acccacagggatcaa

SEQ ID NO: 36224 - DNA, 15 bp, Homo sapiens
cccacagggatcaac

SEQ ID NO: 36225 - DNA, 15 bp, Homo sapiens
ccacagggatcaacg

SEQ ID NO: 36226 - DNA, 15 bp, Homo sapiens
cacagggatcaacgt

SEQ ID NO: 36227 - DNA, 15 bp, Homo sapiens
acagggatcaacgtg

SEQ ID NO: 36228 - DNA, 15 bp, Homo sapiens
cagggatcaacgtgg

SEQ ID NO: 36229 - DNA, 15 bp, Homo sapiens
agggatcaacgtggc

SEQ ID NO: 36230 - DNA, 15 bp, Homo sapiens
gggatcaacgtggcc

SEQ ID NO: 36231 - DNA, 15 bp, Homo sapiens
ggatcaacgtggcca

SEQ ID NO: 36232 - DNA, 15 bp, Homo sapiens
gatcaacgtggccag

SEQ ID NO: 36233 - DNA, 15 bp, Homo sapiens
atcaacgtggccagc

SEQ ID NO: 36234 - DNA, 15 bp, Homo sapiens
tcaacgtggccagcc

SEQ ID NO: 36235 - DNA, 15 bp, Homo sapiens
caacgtggccagcct

SEQ ID NO: 36236 - DNA, 15 bp, Homo sapiens
aacgtggccagcctg

SEQ ID NO: 36237 - DNA, 15 bp, Homo sapiens
acgtggccagcctgg

SEQ ID NO: 36238 - DNA, 15 bp, Homo sapiens
cgtggccagcctgga

SEQ ID NO: 36239 - DNA, 15 bp, Homo sapiens
gtggccagcctggaa

SEQ ID NO: 36240 - DNA, 15 bp, Homo sapiens
tggccagcctggaat

SEQ ID NO: 36241 - DNA, 15 bp, Homo sapiens
ggccagcctggaatg

SEQ ID NO: 36242 - DNA, 15 bp, Homo sapiens
gccagcctggaatgg

SEQ ID NO: 36243 - DNA, 15 bp, Homo sapiens
ccagcctggaatggg

SEQ ID NO: 36244 - DNA, 15 bp, Homo sapiens
cagcctggaatgggt

SEQ ID NO: 36245 - DNA, 15 bp, Homo sapiens
agcctggaatgggtg

SEQ ID NO: 36246 - DNA, 15 bp, Homo sapiens
gcctggaatgggtgt

SEQ ID NO: 36247 - DNA, 15 bp, Homo sapiens
cctggaatgggtgtc

SEQ ID NO: 36248 - DNA, 15 bp, Homo sapiens
ctggaatgggtgtcc

SEQ ID NO: 36249 - DNA, 15 bp, Homo sapiens
tggaatgggtgtcca

SEQ ID NO: 36250 - DNA, 15 bp, Homo sapiens
ggaatgggtgtccag

SEQ ID NO: 36251 - DNA, 15 bp, Homo sapiens
gaatgggtgtccagg

SEQ ID NO: 36252 - DNA, 15 bp, Homo sapiens
aatgggtgtccaggg

SEQ ID NO: 36253 - DNA, 15 bp, Homo sapiens
atgggtgtccaggga

SEQ ID NO: 36254 - DNA, 15 bp, Homo sapiens
tgggtgtccagggag

SEQ ID NO: 36255 - DNA, 15 bp, Homo sapiens
gggtgtccagggagc

SEQ ID NO: 36256 - DNA, 15 bp, Homo sapiens
ggtgtccagggagcc

SEQ ID NO: 36257 - DNA, 15 bp, Homo sapiens
gtgtccagggagccg

SEQ ID NO: 36258 - DNA, 15 bp, Homo sapiens
tgtccagggagccgg

SEQ ID NO: 36259 - DNA, 15 bp, Homo sapiens
gtccagggagccggc

SEQ ID NO: 36260 - DNA, 15 bp, Homo sapiens
tccagggagccggca

SEQ ID NO: 36261 - DNA, 15 bp, Homo sapiens
ccagggagccggcac

SEQ ID NO: 36262 - DNA, 15 bp, Homo sapiens
cagggagccggcact

SEQ ID NO: 36263 - DNA, 15 bp, Homo sapiens
agggagccggcactg

SEQ ID NO: 36264 - DNA, 15 bp, Homo sapiens
gggagccggcactgc

SEQ ID NO: 36265 - DNA, 15 bp, Homo sapiens
ggagccggcactgct

SEQ ID NO: 36266 - DNA, 15 bp, Homo sapiens
gagccggcactgctc

SEQ ID NO: 36267 - DNA, 15 bp, Homo sapiens
agccggcactgctct

SEQ ID NO: 36268 - DNA, 15 bp, Homo sapiens
gccggcactgctctg

SEQ ID NO: 36269 - DNA, 15 bp, Homo sapiens
ccggcactgctctgc

SEQ ID NO: 36270 - DNA, 15 bp, Homo sapiens
cggcactgctctgca

SEQ ID NO: 36271 - DNA, 15 bp, Homo sapiens
ggcactgctctgcac

SEQ ID NO: 36272 - DNA, 15 bp, Homo sapiens
gcactgctctgcacc

SEQ ID NO: 36273 - DNA, 15 bp, Homo sapiens
cactgctctgcacct

SEQ ID NO: 36274 - DNA, 15 bp, Homo sapiens
actgctctgcacctt

SEQ ID NO: 36275 - DNA, 15 bp, Homo sapiens
ctgctctgcaccttc

SEQ ID NO: 36276 - DNA, 15 bp, Homo sapiens
tgctctgcaccttcc

SEQ ID NO: 36277 - DNA, 15 bp, Homo sapiens
gctctgcaccttccc

SEQ ID NO: 36278 - DNA, 15 bp, Homo sapiens
ctctgcaccttccca

SEQ ID NO: 36279 - DNA, 15 bp, Homo sapiens
tctgcaccttcccaa

SEQ ID NO: 36280 - DNA, 15 bp, Homo sapiens
ctgcaccttcccaaa

SEQ ID NO: 36281 - DNA, 15 bp, Homo sapiens
tgcaccttcccaaat

SEQ ID NO: 36282 - DNA, 15 bp, Homo sapiens
gcaccttcccaaatc

SEQ ID NO: 36283 - DNA, 15 bp, Homo sapiens
caccttcccaaatcc

SEQ ID NO: 36284 - DNA, 15 bp, Homo sapiens
accttcccaaatccc

SEQ ID NO: 36285 - DNA, 15 bp, Homo sapiens
ccttcccaaatccca

SEQ ID NO: 36286 - DNA, 15 bp, Homo sapiens
cttcccaaatcccag

SEQ ID NO: 36287 - DNA, 15 bp, Homo sapiens
ttcccaaatcccagt

SEQ ID NO: 36288 - DNA, 15 bp, Homo sapiens
tcccaaatcccagtg

SEQ ID NO: 36289 - DNA, 15 bp, Homo sapiens
cccaaatcccagtgc

SEQ ID NO: 36290 - DNA, 15 bp, Homo sapiens
ccaaatcccagtgca

SEQ ID NO: 36291 - DNA, 15 bp, Homo sapiens
caaatcccagtgcac

SEQ ID NO: 36292 - DNA, 15 bp, Homo sapiens
aaatcccagtgcacc

SEQ ID NO: 36293 - DNA, 15 bp, Homo sapiens
aatcccagtgcaccc

SEQ ID NO: 36294 - DNA, 15 bp, Homo sapiens
atcccagtgcaccca

SEQ ID NO: 36295 - DNA, 15 bp, Homo sapiens
tcccagtgcacccag

SEQ ID NO: 36296 - DNA, 15 bp, Homo sapiens
cccagtgcacccagg

SEQ ID NO: 36297 - DNA, 15 bp, Homo sapiens
ccagtgcacccagga

SEQ ID NO: 36298 - DNA, 15 bp, Homo sapiens
cagtgcacccaggaa

SEQ ID NO: 36299 - DNA, 15 bp, Homo sapiens
agtgcacccaggaag

SEQ ID NO: 36300 - DNA, 15 bp, Homo sapiens
gtgcacccaggaagg

SEQ ID NO: 36301 - DNA, 15 bp, Homo sapiens
tgcacccaggaagga

SEQ ID NO: 36302 - DNA, 15 bp, Homo sapiens
gcacccaggaaggac

SEQ ID NO: 36303 - DNA, 15 bp, Homo sapiens
cacccaggaaggaca

SEQ ID NO: 36304 - DNA, 15 bp, Homo sapiens
acccaggaaggacag

SEQ ID NO: 36305 - DNA, 15 bp, Homo sapiens
cccaggaaggacagg

SEQ ID NO: 36306 - DNA, 15 bp, Homo sapiens
ccaggaaggacaggt

SEQ ID NO: 36307 - DNA, 15 bp, Homo sapiens
caggaaggacaggtc

SEQ ID NO: 36308 - DNA, 15 bp, Homo sapiens
aggaaggacaggtca

SEQ ID NO: 36309 - DNA, 15 bp, Homo sapiens
ggaaggacaggtcag

SEQ ID NO: 36310 - DNA, 15 bp, Homo sapiens
gaaggacaggtcagt

SEQ ID NO: 36311 - DNA, 15 bp, Homo sapiens
aaggacaggtcagtg

SEQ ID NO: 36312 - DNA, 15 bp, Homo sapiens
aggacaggtcagtgg

SEQ ID NO: 36313 - DNA, 15 bp, Homo sapiens
ggacaggtcagtgga

SEQ ID NO: 36314 - DNA, 15 bp, Homo sapiens
gacaggtcagtggac

SEQ ID NO: 36315 - DNA, 15 bp, Homo sapiens
acaggtcagtggaca

SEQ ID NO: 36316 - DNA, 15 bp, Homo sapiens
caggtcagtggacag

SEQ ID NO: 36317 - DNA, 15 bp, Homo sapiens
aggtcagtggacagg

SEQ ID NO: 36318 - DNA, 15 bp, Homo sapiens
ggtcagtggacaggg

SEQ ID NO: 36319 - DNA, 15 bp, Homo sapiens
gtcagtggacagggc

SEQ ID NO: 36320 - DNA, 15 bp, Homo sapiens
tcagtggacagggct

SEQ ID NO: 36321 - DNA, 15 bp, Homo sapiens
cagtggacagggctg

SEQ ID NO: 36322 - DNA, 15 bp, Homo sapiens
agtggacagggctgg

SEQ ID NO: 36323 - DNA, 15 bp, Homo sapiens
gtggacagggctggg

SEQ ID NO: 36324 - DNA, 15 bp, Homo sapiens
tggacagggctggga

SEQ ID NO: 36325 - DNA, 15 bp, Homo sapiens
ggacagggctgggaa

SEQ ID NO: 36326 - DNA, 15 bp, Homo sapiens
gacagggctgggaag

SEQ ID NO: 36327 - DNA, 15 bp, Homo sapiens
acagggctgggaagg

SEQ ID NO: 36328 - DNA, 15 bp, Homo sapiens
cagggctgggaagga

SEQ ID NO: 36329 - DNA, 15 bp, Homo sapiens
agggctgggaaggat

SEQ ID NO: 36330 - DNA, 15 bp, Homo sapiens
gggctgggaaggatc

SEQ ID NO: 36331 - DNA, 15 bp, Homo sapiens
ggctgggaaggatcc

SEQ ID NO: 36332 - DNA, 15 bp, Homo sapiens
gctgggaaggatcct

SEQ ID NO: 36333 - DNA, 15 bp, Homo sapiens
ctgggaaggatcctc

SEQ ID NO: 36334 - DNA, 15 bp, Homo sapiens
tgggaaggatcctcg

SEQ ID NO: 36335 - DNA, 15 bp, Homo sapiens
gggaaggatcctcgc

SEQ ID NO: 36336 - DNA, 15 bp, Homo sapiens
ggaaggatcctcgcc

SEQ ID NO: 36337 - DNA, 15 bp, Homo sapiens
gaaggatcctcgccc

SEQ ID NO: 36338 - DNA, 15 bp, Homo sapiens
aaggatcctcgccct

SEQ ID NO: 36339 - DNA, 15 bp, Homo sapiens
aggatcctcgccctc

SEQ ID NO: 36340 - DNA, 15 bp, Homo sapiens
ggatcctcgccctcc

SEQ ID NO: 36341 - DNA, 15 bp, Homo sapiens
gatcctcgccctcct

SEQ ID NO: 36342 - DNA, 15 bp, Homo sapiens
atcctcgccctccta

SEQ ID NO: 36343 - DNA, 15 bp, Homo sapiens
tcctcgccctcctat

SEQ ID NO: 36344 - DNA, 15 bp, Homo sapiens
cctcgccctcctatc

SEQ ID NO: 36345 - DNA, 15 bp, Homo sapiens
ctcgccctcctatcc

SEQ ID NO: 36346 - DNA, 15 bp, Homo sapiens
tcgccctcctatccc

SEQ ID NO: 36347 - DNA, 15 bp, Homo sapiens
cgccctcctatcccc

SEQ ID NO: 36348 - DNA, 15 bp, Homo sapiens
gccctcctatcccct

SEQ ID NO: 36349 - DNA, 15 bp, Homo sapiens
ccctcctatcccctc

SEQ ID NO: 36350 - DNA, 15 bp, Homo sapiens
cctcctatcccctcc

SEQ ID NO: 36351 - DNA, 15 bp, Homo sapiens
ctcctatcccctccc

SEQ ID NO: 36352 - DNA, 15 bp, Homo sapiens
tcctatcccctcccc

SEQ ID NO: 36353 - DNA, 15 bp, Homo sapiens
cctatcccctcccct

SEQ ID NO: 36354 - DNA, 15 bp, Homo sapiens
ctatcccctcccctg

SEQ ID NO: 36355 - DNA, 15 bp, Homo sapiens
tatcccctcccctga

SEQ ID NO: 36356 - DNA, 15 bp, Homo sapiens
atcccctcccctgac

SEQ ID NO: 36357 - DNA, 15 bp, Homo sapiens
tcccctcccctgaca

SEQ ID NO: 36358 - DNA, 15 bp, Homo sapiens
cccctcccctgacac

SEQ ID NO: 36359 - DNA, 15 bp, Homo sapiens
ccctcccctgacacc

SEQ ID NO: 36360 - DNA, 15 bp, Homo sapiens
cctcccctgacaccc

SEQ ID NO: 36361 - DNA, 15 bp, Homo sapiens
ctcccctgacaccct

SEQ ID NO: 36362 - DNA, 15 bp, Homo sapiens
tcccctgacaccctc

SEQ ID NO: 36363 - DNA, 15 bp, Homo sapiens
cccctgacaccctct

SEQ ID NO: 36364 - DNA, 15 bp, Homo sapiens
ccctgacaccctctg

SEQ ID NO: 36365 - DNA, 15 bp, Homo sapiens
cctgacaccctctgt

SEQ ID NO: 36366 - DNA, 15 bp, Homo sapiens
ctgacaccctctgtc

SEQ ID NO: 36367 - DNA, 15 bp, Homo sapiens
tgacaccctctgtcc

SEQ ID NO: 36368 - DNA, 15 bp, Homo sapiens
gacaccctctgtccc

SEQ ID NO: 36369 - DNA, 15 bp, Homo sapiens
acaccctctgtcccc

SEQ ID NO: 36370 - DNA, 15 bp, Homo sapiens
caccctctgtccccc

SEQ ID NO: 36371 - DNA, 15 bp, Homo sapiens
accctctgtcccccc

SEQ ID NO: 36372 - DNA, 15 bp, Homo sapiens
ccctctgtcccccca

SEQ ID NO: 36373 - DNA, 15 bp, Homo sapiens
cctctgtccccccag

SEQ ID NO: 36374 - DNA, 15 bp, Homo sapiens
ctctgtccccccagc

SEQ ID NO: 36375 - DNA, 15 bp, Homo sapiens
tctgtccccccagca

SEQ ID NO: 36376 - DNA, 15 bp, Homo sapiens
ctgtccccccagcac

SEQ ID NO: 36377 - DNA, 15 bp, Homo sapiens
tgtccccccagcacc

SEQ ID NO: 36378 - DNA, 15 bp, Homo sapiens
gtccccccagcaccc

SEQ ID NO: 36379 - DNA, 15 bp, Homo sapiens
tccccccagcaccct

SEQ ID NO: 36380 - DNA, 15 bp, Homo sapiens
ccccccagcaccctt

SEQ ID NO: 36381 - DNA, 15 bp, Homo sapiens
cccccagcacccttt

SEQ ID NO: 36382 - DNA, 15 bp, Homo sapiens
ccccagcaccctttc

SEQ ID NO: 36383 - DNA, 15 bp, Homo sapiens
cccagcaccctttcg

SEQ ID NO: 36384 - DNA, 15 bp, Homo sapiens
ccagcaccctttcgg

SEQ ID NO: 36385 - DNA, 15 bp, Homo sapiens
cagcaccctttcggc

SEQ ID NO: 36386 - DNA, 15 bp, Homo sapiens
agcaccctttcggct

SEQ ID NO: 36387 - DNA, 15 bp, Homo sapiens
gcaccctttcggctg

SEQ ID NO: 36388 - DNA, 15 bp, Homo sapiens
caccctttcggctgt

SEQ ID NO: 36389 - DNA, 15 bp, Homo sapiens
accctttcggctgtg

SEQ ID NO: 36390 - DNA, 15 bp, Homo sapiens
ccctttcggctgtgc

SEQ ID NO: 36391 - DNA, 15 bp, Homo sapiens
cctttcggctgtgcc

SEQ ID NO: 36392 - DNA, 15 bp, Homo sapiens
ctttcggctgtgccc

SEQ ID NO: 36393 - DNA, 15 bp, Homo sapiens
tttcggctgtgcccc

SEQ ID NO: 36394 - DNA, 15 bp, Homo sapiens
ttcggctgtgcccca

SEQ ID NO: 36395 - DNA, 15 bp, Homo sapiens
tcggctgtgccccag

SEQ ID NO: 36396 - DNA, 15 bp, Homo sapiens
cggctgtgccccaga

SEQ ID NO: 36397 - DNA, 15 bp, Homo sapiens
ggctgtgccccagag

SEQ ID NO: 36398 - DNA, 15 bp, Homo sapiens
gctgtgccccagagc

SEQ ID NO: 36399 - DNA, 15 bp, Homo sapiens
ctgtgccccagagct

SEQ ID NO: 36400 - DNA, 15 bp, Homo sapiens
tgtgccccagagctc

SEQ ID NO: 36401 - DNA, 15 bp, Homo sapiens
gtgccccagagctcc

SEQ ID NO: 36402 - DNA, 15 bp, Homo sapiens
tgccccagagctcct

SEQ ID NO: 36403 - DNA, 15 bp, Homo sapiens
gccccagagctccta

SEQ ID NO: 36404 - DNA, 15 bp, Homo sapiens
ccccagagctcctac

SEQ ID NO: 36405 - DNA, 15 bp, Homo sapiens
cccagagctcctacc

SEQ ID NO: 36406 - DNA, 15 bp, Homo sapiens
ccagagctcctaccc

SEQ ID NO: 36407 - DNA, 15 bp, Homo sapiens
cagagctcctaccca

SEQ ID NO: 36408 - DNA, 15 bp, Homo sapiens
agagctcctacccac

SEQ ID NO: 36409 - DNA, 15 bp, Homo sapiens
gagctcctacccact

SEQ ID NO: 36410 - DNA, 15 bp, Homo sapiens
agctcctacccactg

SEQ ID NO: 36411 - DNA, 15 bp, Homo sapiens
gctcctacccactgc

SEQ ID NO: 36412 - DNA, 15 bp, Homo sapiens
ctcctacccactgct

SEQ ID NO: 36413 - DNA, 15 bp, Homo sapiens
tcctacccactgctg

SEQ ID NO: 36414 - DNA, 15 bp, Homo sapiens
cctacccactgctgg

SEQ ID NO: 36415 - DNA, 15 bp, Homo sapiens
ctacccactgctggc

SEQ ID NO: 36416 - DNA, 15 bp, Homo sapiens
tacccactgctggca

SEQ ID NO: 36417 - DNA, 15 bp, Homo sapiens
acccactgctggcaa

SEQ ID NO: 36418 - DNA, 15 bp, Homo sapiens
cccactgctggcaaa

SEQ ID NO: 36419 - DNA, 15 bp, Homo sapiens
ccactgctggcaaat

SEQ ID NO: 36420 - DNA, 15 bp, Homo sapiens
cactgctggcaaatg

SEQ ID NO: 36421 - DNA, 15 bp, Homo sapiens
actgctggcaaatgg

SEQ ID NO: 36422 - DNA, 15 bp, Homo sapiens
ctgctggcaaatggt

SEQ ID NO: 36423 - DNA, 15 bp, Homo sapiens
tgctggcaaatggtg

SEQ ID NO: 36424 - DNA, 15 bp, Homo sapiens
gctggcaaatggtgt

SEQ ID NO: 36425 - DNA, 15 bp, Homo sapiens
ctggcaaatggtgtc

SEQ ID NO: 36426 - DNA, 15 bp, Homo sapiens
tggcaaatggtgtct

SEQ ID NO: 36427 - DNA, 15 bp, Homo sapiens
ggcaaatggtgtctg

SEQ ID NO: 36428 - DNA, 15 bp, Homo sapiens
gcaaatggtgtctgc

SEQ ID NO: 36429 - DNA, 15 bp, Homo sapiens
caaatggtgtctgca

SEQ ID NO: 36430 - DNA, 15 bp, Homo sapiens
aaatggtgtctgcaa

SEQ ID NO: 36431 - DNA, 15 bp, Homo sapiens
aatggtgtctgcaag

SEQ ID NO: 36432 - DNA, 15 bp, Homo sapiens
atggtgtctgcaagt

SEQ ID NO: 36433 - DNA, 15 bp, Homo sapiens
tggtgtctgcaagtg

SEQ ID NO: 36434 - DNA, 15 bp, Homo sapiens
ggtgtctgcaagtgg

SEQ ID NO: 36435 - DNA, 15 bp, Homo sapiens
gtgtctgcaagtggc

SEQ ID NO: 36436 - DNA, 15 bp, Homo sapiens
tgtctgcaagtggcc

SEQ ID NO: 36437 - DNA, 15 bp, Homo sapiens
gtctgcaagtggccc

SEQ ID NO: 36438 - DNA, 15 bp, Homo sapiens
tctgcaagtggcccg

SEQ ID NO: 36439 - DNA, 15 bp, Homo sapiens
ctgcaagtggcccgg

SEQ ID NO: 36440 - DNA, 15 bp, Homo sapiens
tgcaagtggcccgga

SEQ ID NO: 36441 - DNA, 15 bp, Homo sapiens
gcaagtggcccggat

SEQ ID NO: 36442 - DNA, 15 bp, Homo sapiens
caagtggcccggatg

SEQ ID NO: 36443 - DNA, 15 bp, Homo sapiens
aagtggcccggatgt

SEQ ID NO: 36444 - DNA, 15 bp, Homo sapiens
agtggcccggatgtg

SEQ ID NO: 36445 - DNA, 15 bp, Homo sapiens
gtggcccggatgtga

SEQ ID NO: 36446 - DNA, 15 bp, Homo sapiens
tggcccggatgtgag

SEQ ID NO: 36447 - DNA, 15 bp, Homo sapiens
ggcccggatgtgaga

SEQ ID NO: 36448 - DNA, 15 bp, Homo sapiens
gcccggatgtgagaa

SEQ ID NO: 36449 - DNA, 15 bp, Homo sapiens
cccggatgtgagaag

SEQ ID NO: 36450 - DNA, 15 bp, Homo sapiens
ccggatgtgagaagg

SEQ ID NO: 36451 - DNA, 15 bp, Homo sapiens
cggatgtgagaaggt

SEQ ID NO: 36452 - DNA, 15 bp, Homo sapiens
ggatgtgagaaggtc

SEQ ID NO: 36453 - DNA, 15 bp, Homo sapiens
gatgtgagaaggtct

SEQ ID NO: 36454 - DNA, 15 bp, Homo sapiens
atgtgagaaggtctt

SEQ ID NO: 36455 - DNA, 15 bp, Homo sapiens
tgtgagaaggtcttc

SEQ ID NO: 36456 - DNA, 15 bp, Homo sapiens
gtgagaaggtcttcg

SEQ ID NO: 36457 - DNA, 15 bp, Homo sapiens
tgagaaggtcttcga

SEQ ID NO: 36458 - DNA, 15 bp, Homo sapiens
gagaaggtcttcgaa

SEQ ID NO: 36459 - DNA, 15 bp, Homo sapiens
agaaggtcttcgaag

SEQ ID NO: 36460 - DNA, 15 bp, Homo sapiens
gaaggtcttcgaaga

SEQ ID NO: 36461 - DNA, 15 bp, Homo sapiens
aaggtcttcgaagag

SEQ ID NO: 36462 - DNA, 15 bp, Homo sapiens
aggtcttcgaagagc

SEQ ID NO: 36463 - DNA, 15 bp, Homo sapiens
ggtcttcgaagagcc

SEQ ID NO: 36464 - DNA, 15 bp, Homo sapiens
gtcttcgaagagcca

SEQ ID NO: 36465 - DNA, 15 bp, Homo sapiens
tcttcgaagagccag

SEQ ID NO: 36466 - DNA, 15 bp, Homo sapiens
cttcgaagagccaga

SEQ ID NO: 36467 - DNA, 15 bp, Homo sapiens
ttcgaagagccagag

SEQ ID NO: 36468 - DNA, 15 bp, Homo sapiens
tcgaagagccagagg

SEQ ID NO: 36469 - DNA, 15 bp, Homo sapiens
cgaagagccagagga

SEQ ID NO: 36470 - DNA, 15 bp, Homo sapiens
gaagagccagaggac

SEQ ID NO: 36471 - DNA, 15 bp, Homo sapiens
aagagccagaggact

SEQ ID NO: 36472 - DNA, 15 bp, Homo sapiens
agagccagaggactt

SEQ ID NO: 36473 - DNA, 15 bp, Homo sapiens
gagccagaggacttc

SEQ ID NO: 36474 - DNA, 15 bp, Homo sapiens
agccagaggacttcc

SEQ ID NO: 36475 - DNA, 15 bp, Homo sapiens
gccagaggacttcct

SEQ ID NO: 36476 - DNA, 15 bp, Homo sapiens
ccagaggacttcctc

SEQ ID NO: 36477 - DNA, 15 bp, Homo sapiens
cagaggacttcctca

SEQ ID NO: 36478 - DNA, 15 bp, Homo sapiens
agaggacttcctcaa

SEQ ID NO: 36479 - DNA, 15 bp, Homo sapiens
gaggacttcctcaag

SEQ ID NO: 36480 - DNA, 15 bp, Homo sapiens
aggacttcctcaagt

SEQ ID NO: 36481 - DNA, 15 bp, Homo sapiens
ggacttcctcaagtg

SEQ ID NO: 36482 - DNA, 15 bp, Homo sapiens
gacttcctcaagtga

SEQ ID NO: 36483 - DNA, 15 bp, Homo sapiens
acttcctcaagtgag

SEQ ID NO: 36484 - DNA, 15 bp, Homo sapiens
cttcctcaagtgagt

SEQ ID NO: 36485 - DNA, 15 bp, Homo sapiens
ttcctcaagtgagtg

SEQ ID NO: 36486 - DNA, 15 bp, Homo sapiens
tcctcaagtgagtgg

SEQ ID NO: 36487 - DNA, 15 bp, Homo sapiens
cctcaagtgagtggc

SEQ ID NO: 36488 - DNA, 15 bp, Homo sapiens
ctcaagtgagtggcc

SEQ ID NO: 36489 - DNA, 15 bp, Homo sapiens
tcaagtgagtggccc

SEQ ID NO: 36490 - DNA, 15 bp, Homo sapiens
caagtgagtggccca

SEQ ID NO: 36491 - DNA, 15 bp, Homo sapiens
aagtgagtggcccag

SEQ ID NO: 36492 - DNA, 15 bp, Homo sapiens
agtgagtggcccagg

SEQ ID NO: 36493 - DNA, 15 bp, Homo sapiens
gtgagtggcccaggc

SEQ ID NO: 36494 - DNA, 15 bp, Homo sapiens
tgagtggcccaggcc

SEQ ID NO: 36495 - DNA, 15 bp, Homo sapiens
gagtggcccaggcct

SEQ ID NO: 36496 - DNA, 15 bp, Homo sapiens
agtggcccaggcctg

SEQ ID NO: 36497 - DNA, 15 bp, Homo sapiens
gtggcccaggcctgt

SEQ ID NO: 36498 - DNA, 15 bp, Homo sapiens
tggcccaggcctgtg

SEQ ID NO: 36499 - DNA, 15 bp, Homo sapiens
ggcccaggcctgtgc

SEQ ID NO: 36500 - DNA, 15 bp, Homo sapiens
gcccaggcctgtgcc

SEQ ID NO: 36501 - DNA, 15 bp, Homo sapiens
cccaggcctgtgcca

SEQ ID NO: 36502 - DNA, 15 bp, Homo sapiens
ccaggcctgtgccag

SEQ ID NO: 36503 - DNA, 15 bp, Homo sapiens
caggcctgtgccagt

SEQ ID NO: 36504 - DNA, 15 bp, Homo sapiens
aggcctgtgccagtc

SEQ ID NO: 36505 - DNA, 15 bp, Homo sapiens
ggcctgtgccagtct

SEQ ID NO: 36506 - DNA, 15 bp, Homo sapiens
gcctgtgccagtcta

SEQ ID NO: 36507 - DNA, 15 bp, Homo sapiens
cctgtgccagtctac

SEQ ID NO: 36508 - DNA, 15 bp, Homo sapiens
ctgtgccagtctacc

SEQ ID NO: 36509 - DNA, 15 bp, Homo sapiens
tgtgccagtctaccg

SEQ ID NO: 36510 - DNA, 15 bp, Homo sapiens
gtgccagtctaccgg

SEQ ID NO: 36511 - DNA, 15 bp, Homo sapiens
tgccagtctaccggc

SEQ ID NO: 36512 - DNA, 15 bp, Homo sapiens
gccagtctaccggcc

SEQ ID NO: 36513 - DNA, 15 bp, Homo sapiens
ccagtctaccggccc

SEQ ID NO: 36514 - DNA, 15 bp, Homo sapiens
cagtctaccggccct

SEQ ID NO: 36515 - DNA, 15 bp, Homo sapiens
agtctaccggccctg

SEQ ID NO: 36516 - DNA, 15 bp, Homo sapiens
gtctaccggccctgg

SEQ ID NO: 36517 - DNA, 15 bp, Homo sapiens
tctaccggccctggc

SEQ ID NO: 36518 - DNA, 15 bp, Homo sapiens
ctaccggccctggct

SEQ ID NO: 36519 - DNA, 15 bp, Homo sapiens
taccggccctggctt

SEQ ID NO: 36520 - DNA, 15 bp, Homo sapiens
accggccctggcttg

SEQ ID NO: 36521 - DNA, 15 bp, Homo sapiens
ccggccctggcttgt

SEQ ID NO: 36522 - DNA, 15 bp, Homo sapiens
cggccctggcttgtg

SEQ ID NO: 36523 - DNA, 15 bp, Homo sapiens
ggccctggcttgtgg

SEQ ID NO: 36524 - DNA, 15 bp, Homo sapiens
gccctggcttgtggg

SEQ ID NO: 36525 - DNA, 15 bp, Homo sapiens
ccctggcttgtgggg

SEQ ID NO: 36526 - DNA, 15 bp, Homo sapiens
cctggcttgtgggga

SEQ ID NO: 36527 - DNA, 15 bp, Homo sapiens
ctggcttgtggggag

SEQ ID NO: 36528 - DNA, 15 bp, Homo sapiens
tggcttgtggggaga

SEQ ID NO: 36529 - DNA, 15 bp, Homo sapiens
ggcttgtggggagag

SEQ ID NO: 36530 - DNA, 15 bp, Homo sapiens
gcttgtggggagagg

SEQ ID NO: 36531 - DNA, 15 bp, Homo sapiens
cttgtggggagaggt

SEQ ID NO: 36532 - DNA, 15 bp, Homo sapiens
ttgtggggagaggtc

SEQ ID NO: 36533 - DNA, 15 bp, Homo sapiens
tgtggggagaggtct

SEQ ID NO: 36534 - DNA, 15 bp, Homo sapiens
gtggggagaggtcta

SEQ ID NO: 36535 - DNA, 15 bp, Homo sapiens
tggggagaggtctag

SEQ ID NO: 36536 - DNA, 15 bp, Homo sapiens
ggggagaggtctagg

SEQ ID NO: 36537 - DNA, 15 bp, Homo sapiens
gggagaggtctaggg

SEQ ID NO: 36538 - DNA, 15 bp, Homo sapiens
ggagaggtctagggt

SEQ ID NO: 36539 - DNA, 15 bp, Homo sapiens
gagaggtctagggtg

SEQ ID NO: 36540 - DNA, 15 bp, Homo sapiens
agaggtctagggtgc

SEQ ID NO: 36541 - DNA, 15 bp, Homo sapiens
gaggtctagggtgca

SEQ ID NO: 36542 - DNA, 15 bp, Homo sapiens
aggtctagggtgcag

SEQ ID NO: 36543 - DNA, 15 bp, Homo sapiens
ggtctagggtgcaga

SEQ ID NO: 36544 - DNA, 15 bp, Homo sapiens
gtctagggtgcagat

SEQ ID NO: 36545 - DNA, 15 bp, Homo sapiens
tctagggtgcagatc

SEQ ID NO: 36546 - DNA, 15 bp, Homo sapiens
ctagggtgcagatct

SEQ ID NO: 36547 - DNA, 15 bp, Homo sapiens
tagggtgcagatctc

SEQ ID NO: 36548 - DNA, 15 bp, Homo sapiens
agggtgcagatctca

SEQ ID NO: 36549 - DNA, 15 bp, Homo sapiens
gggtgcagatctcag

SEQ ID NO: 36550 - DNA, 15 bp, Homo sapiens
ggtgcagatctcagc

SEQ ID NO: 36551 - DNA, 15 bp, Homo sapiens
gtgcagatctcagct

SEQ ID NO: 36552 - DNA, 15 bp, Homo sapiens
tgcagatctcagctc

SEQ ID NO: 36553 - DNA, 15 bp, Homo sapiens
gcagatctcagctca

SEQ ID NO: 36554 - DNA, 15 bp, Homo sapiens
cagatctcagctcag

SEQ ID NO: 36555 - DNA, 15 bp, Homo sapiens
agatctcagctcagg

SEQ ID NO: 36556 - DNA, 15 bp, Homo sapiens
gatctcagctcaggc

SEQ ID NO: 36557 - DNA, 15 bp, Homo sapiens
atctcagctcaggct

SEQ ID NO: 36558 - DNA, 15 bp, Homo sapiens
tctcagctcaggctt

SEQ ID NO: 36559 - DNA, 15 bp, Homo sapiens
ctcagctcaggcttc

SEQ ID NO: 36560 - DNA, 15 bp, Homo sapiens
tcagctcaggcttca

SEQ ID NO: 36561 - DNA, 15 bp, Homo sapiens
cagctcaggcttcat

SEQ ID NO: 36562 - DNA, 15 bp, Homo sapiens
agctcaggcttcatc

SEQ ID NO: 36563 - DNA, 15 bp, Homo sapiens
gctcaggcttcatcc

SEQ ID NO: 36564 - DNA, 15 bp, Homo sapiens
ctcaggcttcatccc

SEQ ID NO: 36565 - DNA, 15 bp, Homo sapiens
tcaggcttcatccca

SEQ ID NO: 36566 - DNA, 15 bp, Homo sapiens
caggcttcatcccaa

SEQ ID NO: 36567 - DNA, 15 bp, Homo sapiens
aggcttcatcccaat

SEQ ID NO: 36568 - DNA, 15 bp, Homo sapiens
ggcttcatcccaata

SEQ ID NO: 36569 - DNA, 15 bp, Homo sapiens
gcttcatcccaataa

SEQ ID NO: 36570 - DNA, 15 bp, Homo sapiens
cttcatcccaataag

SEQ ID NO: 36571 - DNA, 15 bp, Homo sapiens
ttcatcccaataagt

SEQ ID NO: 36572 - DNA, 15 bp, Homo sapiens
tcatcccaataagta

SEQ ID NO: 36573 - DNA, 15 bp, Homo sapiens
catcccaataagtag

SEQ ID NO: 36574 - DNA, 15 bp, Homo sapiens
atcccaataagtagt

SEQ ID NO: 36575 - DNA, 15 bp, Homo sapiens
tcccaataagtagta

SEQ ID NO: 36576 - DNA, 15 bp, Homo sapiens
cccaataagtagtaa

SEQ ID NO: 36577 - DNA, 15 bp, Homo sapiens
ccaataagtagtaag

SEQ ID NO: 36578 - DNA, 15 bp, Homo sapiens
caataagtagtaaga

SEQ ID NO: 36579 - DNA, 15 bp, Homo sapiens
aataagtagtaagat

SEQ ID NO: 36580 - DNA, 15 bp, Homo sapiens
ataagtagtaagatg

SEQ ID NO: 36581 - DNA, 15 bp, Homo sapiens
taagtagtaagatgc

SEQ ID NO: 36582 - DNA, 15 bp, Homo sapiens
aagtagtaagatgca

SEQ ID NO: 36583 - DNA, 15 bp, Homo sapiens
agtagtaagatgcaa

SEQ ID NO: 36584 - DNA, 15 bp, Homo sapiens
gtagtaagatgcaag

SEQ ID NO: 36585 - DNA, 15 bp, Homo sapiens
tagtaagatgcaaga

SEQ ID NO: 36586 - DNA, 15 bp, Homo sapiens
agtaagatgcaagag

SEQ ID NO: 36587 - DNA, 15 bp, Homo sapiens
gtaagatgcaagagc

SEQ ID NO: 36588 - DNA, 15 bp, Homo sapiens
taagatgcaagagct

SEQ ID NO: 36589 - DNA, 15 bp, Homo sapiens
aagatgcaagagcta

SEQ ID NO: 36590 - DNA, 15 bp, Homo sapiens
agatgcaagagctaa

SEQ ID NO: 36591 - DNA, 15 bp, Homo sapiens
gatgcaagagctaaa

SEQ ID NO: 36592 - DNA, 15 bp, Homo sapiens
atgcaagagctaaac

SEQ ID NO: 36593 - DNA, 15 bp, Homo sapiens
tgcaagagctaaact

SEQ ID NO: 36594 - DNA, 15 bp, Homo sapiens
gcaagagctaaactc

SEQ ID NO: 36595 - DNA, 15 bp, Homo sapiens
caagagctaaactct

SEQ ID NO: 36596 - DNA, 15 bp, Homo sapiens
aagagctaaactctg

SEQ ID NO: 36597 - DNA, 15 bp, Homo sapiens
agagctaaactctga

SEQ ID NO: 36598 - DNA, 15 bp, Homo sapiens
gagctaaactctgag

SEQ ID NO: 36599 - DNA, 15 bp, Homo sapiens
agctaaactctgaga

SEQ ID NO: 36600 - DNA, 15 bp, Homo sapiens
gctaaactctgagac

SEQ ID NO: 36601 - DNA, 15 bp, Homo sapiens
ctaaactctgagact

SEQ ID NO: 36602 - DNA, 15 bp, Homo sapiens
taaactctgagactg

SEQ ID NO: 36603 - DNA, 15 bp, Homo sapiens
aaactctgagactgt

SEQ ID NO: 36604 - DNA, 15 bp, Homo sapiens
aactctgagactgtg

SEQ ID NO: 36605 - DNA, 15 bp, Homo sapiens
actctgagactgtgg

SEQ ID NO: 36606 - DNA, 15 bp, Homo sapiens
ctctgagactgtggg

SEQ ID NO: 36607 - DNA, 15 bp, Homo sapiens
tctgagactgtgggt

SEQ ID NO: 36608 - DNA, 15 bp, Homo sapiens
ctgagactgtgggtt

SEQ ID NO: 36609 - DNA, 15 bp, Homo sapiens
tgagactgtgggttc

SEQ ID NO: 36610 - DNA, 15 bp, Homo sapiens
gagactgtgggttca

SEQ ID NO: 36611 - DNA, 15 bp, Homo sapiens
agactgtgggttcaa

SEQ ID NO: 36612 - DNA, 15 bp, Homo sapiens
gactgtgggttcaaa

SEQ ID NO: 36613 - DNA, 15 bp, Homo sapiens
actgtgggttcaaat

SEQ ID NO: 36614 - DNA, 15 bp, Homo sapiens
ctgtgggttcaaatc

SEQ ID NO: 36615 - DNA, 15 bp, Homo sapiens
tgtgggttcaaatcc

SEQ ID NO: 36616 - DNA, 15 bp, Homo sapiens
gtgggttcaaatccc

SEQ ID NO: 36617 - DNA, 15 bp, Homo sapiens
tgggttcaaatccca

SEQ ID NO: 36618 - DNA, 15 bp, Homo sapiens
gggttcaaatcccag

SEQ ID NO: 36619 - DNA, 15 bp, Homo sapiens
ggttcaaatcccagc

SEQ ID NO: 36620 - DNA, 15 bp, Homo sapiens
gttcaaatcccagct

SEQ ID NO: 36621 - DNA, 15 bp, Homo sapiens
ttcaaatcccagctc

SEQ ID NO: 36622 - DNA, 15 bp, Homo sapiens
tcaaatcccagctcc

SEQ ID NO: 36623 - DNA, 15 bp, Homo sapiens
caaatcccagctcca

SEQ ID NO: 36624 - DNA, 15 bp, Homo sapiens
aaatcccagctccat

SEQ ID NO: 36625 - DNA, 15 bp, Homo sapiens
aatcccagctccatc

SEQ ID NO: 36626 - DNA, 15 bp, Homo sapiens
atcccagctccatcc

SEQ ID NO: 36627 - DNA, 15 bp, Homo sapiens
tcccagctccatccc

SEQ ID NO: 36628 - DNA, 15 bp, Homo sapiens
cccagctccatccct

SEQ ID NO: 36629 - DNA, 15 bp, Homo sapiens
ccagctccatccctg

SEQ ID NO: 36630 - DNA, 15 bp, Homo sapiens
cagctccatccctga

SEQ ID NO: 36631 - DNA, 15 bp, Homo sapiens
agctccatccctgac

SEQ ID NO: 36632 - DNA, 15 bp, Homo sapiens
gctccatccctgact

SEQ ID NO: 36633 - DNA, 15 bp, Homo sapiens
ctccatccctgactg

SEQ ID NO: 36634 - DNA, 15 bp, Homo sapiens
tccatccctgactgg

SEQ ID NO: 36635 - DNA, 15 bp, Homo sapiens
ccatccctgactggc

SEQ ID NO: 36636 - DNA, 15 bp, Homo sapiens
catccctgactggct

SEQ ID NO: 36637 - DNA, 15 bp, Homo sapiens
atccctgactggctg

SEQ ID NO: 36638 - DNA, 15 bp, Homo sapiens
tccctgactggctgt

SEQ ID NO: 36639 - DNA, 15 bp, Homo sapiens
ccctgactggctgtg

SEQ ID NO: 36640 - DNA, 15 bp, Homo sapiens
cctgactggctgtgt

SEQ ID NO: 36641 - DNA, 15 bp, Homo sapiens
ctgactggctgtgtg

SEQ ID NO: 36642 - DNA, 15 bp, Homo sapiens
tgactggctgtgtga

SEQ ID NO: 36643 - DNA, 15 bp, Homo sapiens
gactggctgtgtgac

SEQ ID NO: 36644 - DNA, 15 bp, Homo sapiens
actggctgtgtgacc

SEQ ID NO: 36645 - DNA, 15 bp, Homo sapiens
ctggctgtgtgacct

SEQ ID NO: 36646 - DNA, 15 bp, Homo sapiens
tggctgtgtgacctt

SEQ ID NO: 36647 - DNA, 15 bp, Homo sapiens
ggctgtgtgaccttg

SEQ ID NO: 36648 - DNA, 15 bp, Homo sapiens
gctgtgtgaccttgg

SEQ ID NO: 36649 - DNA, 15 bp, Homo sapiens
ctgtgtgaccttgga

SEQ ID NO: 36650 - DNA, 15 bp, Homo sapiens
tgtgtgaccttggac

SEQ ID NO: 36651 - DNA, 15 bp, Homo sapiens
gtgtgaccttggaca

SEQ ID NO: 36652 - DNA, 15 bp, Homo sapiens
tgtgaccttggacaa

SEQ ID NO: 36653 - DNA, 15 bp, Homo sapiens
gtgaccttggacaaa

SEQ ID NO: 36654 - DNA, 15 bp, Homo sapiens
tgaccttggacaaat

SEQ ID NO: 36655 - DNA, 15 bp, Homo sapiens
gaccttggacaaatt

SEQ ID NO: 36656 - DNA, 15 bp, Homo sapiens
accttggacaaatta

SEQ ID NO: 36657 - DNA, 15 bp, Homo sapiens
ccttggacaaattac

SEQ ID NO: 36658 - DNA, 15 bp, Homo sapiens
cttggacaaattact

SEQ ID NO: 36659 - DNA, 15 bp, Homo sapiens
ttggacaaattactt

SEQ ID NO: 36660 - DNA, 15 bp, Homo sapiens
tggacaaattactta

SEQ ID NO: 36661 - DNA, 15 bp, Homo sapiens
ggacaaattacttag

SEQ ID NO: 36662 - DNA, 15 bp, Homo sapiens
gacaaattacttagc

SEQ ID NO: 36663 - DNA, 15 bp, Homo sapiens
acaaattacttagct

SEQ ID NO: 36664 - DNA, 15 bp, Homo sapiens
caaattacttagctt

SEQ ID NO: 36665 - DNA, 15 bp, Homo sapiens
aaattacttagcttc

SEQ ID NO: 36666 - DNA, 15 bp, Homo sapiens
aattacttagcttct

SEQ ID NO: 36667 - DNA, 15 bp, Homo sapiens
attacttagcttctc

SEQ ID NO: 36668 - DNA, 15 bp, Homo sapiens
ttacttagcttctct

SEQ ID NO: 36669 - DNA, 15 bp, Homo sapiens
tacttagcttctctc

SEQ ID NO: 36670 - DNA, 15 bp, Homo sapiens
acttagcttctctcg

SEQ ID NO: 36671 - DNA, 15 bp, Homo sapiens
cttagcttctctcga

SEQ ID NO: 36672 - DNA, 15 bp, Homo sapiens
ttagcttctctcgac

SEQ ID NO: 36673 - DNA, 15 bp, Homo sapiens
tagcttctctcgacc

SEQ ID NO: 36674 - DNA, 15 bp, Homo sapiens
agcttctctcgacct

SEQ ID NO: 36675 - DNA, 15 bp, Homo sapiens
gcttctctcgacctc

SEQ ID NO: 36676 - DNA, 15 bp, Homo sapiens
cttctctcgacctca

SEQ ID NO: 36677 - DNA, 15 bp, Homo sapiens
ttctctcgacctcag

SEQ ID NO: 36678 - DNA, 15 bp, Homo sapiens
tctctcgacctcagt

SEQ ID NO: 36679 - DNA, 15 bp, Homo sapiens
ctctcgacctcagtt

SEQ ID NO: 36680 - DNA, 15 bp, Homo sapiens
tctcgacctcagttt

SEQ ID NO: 36681 - DNA, 15 bp, Homo sapiens
ctcgacctcagtttt

SEQ ID NO: 36682 - DNA, 15 bp, Homo sapiens
tcgacctcagttttc

SEQ ID NO: 36683 - DNA, 15 bp, Homo sapiens
cgacctcagttttct

SEQ ID NO: 36684 - DNA, 15 bp, Homo sapiens
gacctcagttttctc

SEQ ID NO: 36685 - DNA, 15 bp, Homo sapiens
acctcagttttctcg

SEQ ID NO: 36686 - DNA, 15 bp, Homo sapiens
cctcagttttctcgt

SEQ ID NO: 36687 - DNA, 15 bp, Homo sapiens
ctcagttttctcgta

SEQ ID NO: 36688 - DNA, 15 bp, Homo sapiens
tcagttttctcgtat

SEQ ID NO: 36689 - DNA, 15 bp, Homo sapiens
cagttttctcgtatg

SEQ ID NO: 36690 - DNA, 15 bp, Homo sapiens
agttttctcgtatgt

SEQ ID NO: 36691 - DNA, 15 bp, Homo sapiens
gttttctcgtatgta

SEQ ID NO: 36692 - DNA, 15 bp, Homo sapiens
ttttctcgtatgtat

SEQ ID NO: 36693 - DNA, 15 bp, Homo sapiens
tttctcgtatgtata

SEQ ID NO: 36694 - DNA, 15 bp, Homo sapiens
ttctcgtatgtataa

SEQ ID NO: 36695 - DNA, 15 bp, Homo sapiens
tctcgtatgtataat

SEQ ID NO: 36696 - DNA, 15 bp, Homo sapiens
ctcgtatgtataata

SEQ ID NO: 36697 - DNA, 15 bp, Homo sapiens
tcgtatgtataataa

SEQ ID NO: 36698 - DNA, 15 bp, Homo sapiens
cgtatgtataataag

SEQ ID NO: 36699 - DNA, 15 bp, Homo sapiens
gtatgtataataaga

SEQ ID NO: 36700 - DNA, 15 bp, Homo sapiens
tatgtataataagaa

SEQ ID NO: 36701 - DNA, 15 bp, Homo sapiens
atgtataataagaaa

SEQ ID NO: 36702 - DNA, 15 bp, Homo sapiens
tgtataataagaaac

SEQ ID NO: 36703 - DNA, 15 bp, Homo sapiens
gtataataagaaacg

SEQ ID NO: 36704 - DNA, 15 bp, Homo sapiens
tataataagaaacgt

SEQ ID NO: 36705 - DNA, 15 bp, Homo sapiens
ataataagaaacgtt

SEQ ID NO: 36706 - DNA, 15 bp, Homo sapiens
taataagaaacgttt

SEQ ID NO: 36707 - DNA, 15 bp, Homo sapiens
aataagaaacgtttg

SEQ ID NO: 36708 - DNA, 15 bp, Homo sapiens
ataagaaacgtttgt

SEQ ID NO: 36709 - DNA, 15 bp, Homo sapiens
taagaaacgtttgtg

SEQ ID NO: 36710 - DNA, 15 bp, Homo sapiens
aagaaacgtttgtgc

SEQ ID NO: 36711 - DNA, 15 bp, Homo sapiens
agaaacgtttgtgct

SEQ ID NO: 36712 - DNA, 15 bp, Homo sapiens
gaaacgtttgtgctg

SEQ ID NO: 36713 - DNA, 15 bp, Homo sapiens
aaacgtttgtgctgt

SEQ ID NO: 36714 - DNA, 15 bp, Homo sapiens
aacgtttgtgctgtt

SEQ ID NO: 36715 - DNA, 15 bp, Homo sapiens
acgtttgtgctgtta

SEQ ID NO: 36716 - DNA, 15 bp, Homo sapiens
cgtttgtgctgttat

SEQ ID NO: 36717 - DNA, 15 bp, Homo sapiens
gtttgtgctgttatt

SEQ ID NO: 36718 - DNA, 15 bp, Homo sapiens
tttgtgctgttattt

SEQ ID NO: 36719 - DNA, 15 bp, Homo sapiens
ttgtgctgttattta

SEQ ID NO: 36720 - DNA, 15 bp, Homo sapiens
tgtgctgttatttac

SEQ ID NO: 36721 - DNA, 15 bp, Homo sapiens
gtgctgttatttacc

SEQ ID NO: 36722 - DNA, 15 bp, Homo sapiens
tgctgttatttaccc

SEQ ID NO: 36723 - DNA, 15 bp, Homo sapiens
gctgttatttacccc

SEQ ID NO: 36724 - DNA, 15 bp, Homo sapiens
ctgttatttaccccc

SEQ ID NO: 36725 - DNA, 15 bp, Homo sapiens
tgttatttaccccca

SEQ ID NO: 36726 - DNA, 15 bp, Homo sapiens
gttatttacccccat

SEQ ID NO: 36727 - DNA, 15 bp, Homo sapiens
ttatttacccccatt

SEQ ID NO: 36728 - DNA, 15 bp, Homo sapiens
tatttacccccattt

SEQ ID NO: 36729 - DNA, 15 bp, Homo sapiens
atttacccccatttt

SEQ ID NO: 36730 - DNA, 15 bp, Homo sapiens
tttacccccatttta

SEQ ID NO: 36731 - DNA, 15 bp, Homo sapiens
ttacccccattttac

SEQ ID NO: 36732 - DNA, 15 bp, Homo sapiens
tacccccattttaca

SEQ ID NO: 36733 - DNA, 15 bp, Homo sapiens
acccccattttacag

SEQ ID NO: 36734 - DNA, 15 bp, Homo sapiens
cccccattttacaga

SEQ ID NO: 36735 - DNA, 15 bp, Homo sapiens
ccccattttacagac

SEQ ID NO: 36736 - DNA, 15 bp, Homo sapiens
cccattttacagaca

SEQ ID NO: 36737 - DNA, 15 bp, Homo sapiens
ccattttacagacaa

SEQ ID NO: 36738 - DNA, 15 bp, Homo sapiens
cattttacagacaag

SEQ ID NO: 36739 - DNA, 15 bp, Homo sapiens
attttacagacaagg

SEQ ID NO: 36740 - DNA, 15 bp, Homo sapiens
ttttacagacaagga

SEQ ID NO: 36741 - DNA, 15 bp, Homo sapiens
tttacagacaaggag

SEQ ID NO: 36742 - DNA, 15 bp, Homo sapiens
ttacagacaaggaga

SEQ ID NO: 36743 - DNA, 15 bp, Homo sapiens
tacagacaaggagac

SEQ ID NO: 36744 - DNA, 15 bp, Homo sapiens
acagacaaggagact

SEQ ID NO: 36745 - DNA, 15 bp, Homo sapiens
cagacaaggagactg

SEQ ID NO: 36746 - DNA, 15 bp, Homo sapiens
agacaaggagactga

SEQ ID NO: 36747 - DNA, 15 bp, Homo sapiens
gacaaggagactgag

SEQ ID NO: 36748 - DNA, 15 bp, Homo sapiens
acaaggagactgagg

SEQ ID NO: 36749 - DNA, 15 bp, Homo sapiens
caaggagactgaggc

SEQ ID NO: 36750 - DNA, 15 bp, Homo sapiens
aaggagactgaggcc

SEQ ID NO: 36751 - DNA, 15 bp, Homo sapiens
aggagactgaggcca

SEQ ID NO: 36752 - DNA, 15 bp, Homo sapiens
ggagactgaggccaa

SEQ ID NO: 36753 - DNA, 15 bp, Homo sapiens
gagactgaggccaaa

SEQ ID NO: 36754 - DNA, 15 bp, Homo sapiens
agactgaggccaaag

SEQ ID NO: 36755 - DNA, 15 bp, Homo sapiens
gactgaggccaaaga

SEQ ID NO: 36756 - DNA, 15 bp, Homo sapiens
actgaggccaaagag

SEQ ID NO: 36757 - DNA, 15 bp, Homo sapiens
ctgaggccaaagagg

SEQ ID NO: 36758 - DNA, 15 bp, Homo sapiens
tgaggccaaagaggt

SEQ ID NO: 36759 - DNA, 15 bp, Homo sapiens
gaggccaaagaggtt

SEQ ID NO: 36760 - DNA, 15 bp, Homo sapiens
aggccaaagaggtta

SEQ ID NO: 36761 - DNA, 15 bp, Homo sapiens
ggccaaagaggttaa

SEQ ID NO: 36762 - DNA, 15 bp, Homo sapiens
gccaaagaggttaag

SEQ ID NO: 36763 - DNA, 15 bp, Homo sapiens
ccaaagaggttaagt

SEQ ID NO: 36764 - DNA, 15 bp, Homo sapiens
caaagaggttaagtg

SEQ ID NO: 36765 - DNA, 15 bp, Homo sapiens
aaagaggttaagtgt

SEQ ID NO: 36766 - DNA, 15 bp, Homo sapiens
aagaggttaagtgtc

SEQ ID NO: 36767 - DNA, 15 bp, Homo sapiens
agaggttaagtgtct

SEQ ID NO: 36768 - DNA, 15 bp, Homo sapiens
gaggttaagtgtctt

SEQ ID NO: 36769 - DNA, 15 bp, Homo sapiens
aggttaagtgtcttg

SEQ ID NO: 36770 - DNA, 15 bp, Homo sapiens
ggttaagtgtcttga

SEQ ID NO: 36771 - DNA, 15 bp, Homo sapiens
gttaagtgtcttgat

SEQ ID NO: 36772 - DNA, 15 bp, Homo sapiens
ttaagtgtcttgatc

SEQ ID NO: 36773 - DNA, 15 bp, Homo sapiens
taagtgtcttgatca

SEQ ID NO: 36774 - DNA, 15 bp, Homo sapiens
aagtgtcttgatcaa

SEQ ID NO: 36775 - DNA, 15 bp, Homo sapiens
agtgtcttgatcaaa

SEQ ID NO: 36776 - DNA, 15 bp, Homo sapiens
gtgtcttgatcaaaa

SEQ ID NO: 36777 - DNA, 15 bp, Homo sapiens
tgtcttgatcaaaat

SEQ ID NO: 36778 - DNA, 15 bp, Homo sapiens
gtcttgatcaaaatc

SEQ ID NO: 36779 - DNA, 15 bp, Homo sapiens
tcttgatcaaaatct

SEQ ID NO: 36780 - DNA, 15 bp, Homo sapiens
cttgatcaaaatctc

SEQ ID NO: 36781 - DNA, 15 bp, Homo sapiens
ttgatcaaaatctcc

SEQ ID NO: 36782 - DNA, 15 bp, Homo sapiens
tgatcaaaatctccc

SEQ ID NO: 36783 - DNA, 15 bp, Homo sapiens
gatcaaaatctccca

SEQ ID NO: 36784 - DNA, 15 bp, Homo sapiens
atcaaaatctcccag

SEQ ID NO: 36785 - DNA, 15 bp, Homo sapiens
tcaaaatctcccagt

SEQ ID NO: 36786 - DNA, 15 bp, Homo sapiens
caaaatctcccagtt

SEQ ID NO: 36787 - DNA, 15 bp, Homo sapiens
aaaatctcccagttc

SEQ ID NO: 36788 - DNA, 15 bp, Homo sapiens
aaatctcccagttcc

SEQ ID NO: 36789 - DNA, 15 bp, Homo sapiens
aatctcccagttcct

SEQ ID NO: 36790 - DNA, 15 bp, Homo sapiens
atctcccagttcctg

SEQ ID NO: 36791 - DNA, 15 bp, Homo sapiens
tctcccagttcctga

SEQ ID NO: 36792 - DNA, 15 bp, Homo sapiens
ctcccagttcctgag

SEQ ID NO: 36793 - DNA, 15 bp, Homo sapiens
tcccagttcctgagt

SEQ ID NO: 36794 - DNA, 15 bp, Homo sapiens
cccagttcctgagtg

SEQ ID NO: 36795 - DNA, 15 bp, Homo sapiens
ccagttcctgagtga

SEQ ID NO: 36796 - DNA, 15 bp, Homo sapiens
cagttcctgagtgac

SEQ ID NO: 36797 - DNA, 15 bp, Homo sapiens
agttcctgagtgaca

SEQ ID NO: 36798 - DNA, 15 bp, Homo sapiens
gttcctgagtgacag

SEQ ID NO: 36799 - DNA, 15 bp, Homo sapiens
ttcctgagtgacaga

SEQ ID NO: 36800 - DNA, 15 bp, Homo sapiens
tcctgagtgacagag

SEQ ID NO: 36801 - DNA, 15 bp, Homo sapiens
cctgagtgacagagc

SEQ ID NO: 36802 - DNA, 15 bp, Homo sapiens
ctgagtgacagagct

SEQ ID NO: 36803 - DNA, 15 bp, Homo sapiens
tgagtgacagagctg

SEQ ID NO: 36804 - DNA, 15 bp, Homo sapiens
gagtgacagagctgg

SEQ ID NO: 36805 - DNA, 15 bp, Homo sapiens
agtgacagagctggg

SEQ ID NO: 36806 - DNA, 15 bp, Homo sapiens
gtgacagagctggga

SEQ ID NO: 36807 - DNA, 15 bp, Homo sapiens
tgacagagctgggat

SEQ ID NO: 36808 - DNA, 15 bp, Homo sapiens
gacagagctgggatt

SEQ ID NO: 36809 - DNA, 15 bp, Homo sapiens
acagagctgggattt

SEQ ID NO: 36810 - DNA, 15 bp, Homo sapiens
cagagctgggatttg

SEQ ID NO: 36811 - DNA, 15 bp, Homo sapiens
agagctgggatttga

SEQ ID NO: 36812 - DNA, 15 bp, Homo sapiens
gagctgggatttgaa

SEQ ID NO: 36813 - DNA, 15 bp, Homo sapiens
agctgggatttgaac

SEQ ID NO: 36814 - DNA, 15 bp, Homo sapiens
gctgggatttgaacc

SEQ ID NO: 36815 - DNA, 15 bp, Homo sapiens
ctgggatttgaaccc

SEQ ID NO: 36816 - DNA, 15 bp, Homo sapiens
tgggatttgaaccca

SEQ ID NO: 36817 - DNA, 15 bp, Homo sapiens
gggatttgaacccat

SEQ ID NO: 36818 - DNA, 15 bp, Homo sapiens
ggatttgaacccatg

SEQ ID NO: 36819 - DNA, 15 bp, Homo sapiens
gatttgaacccatgt

SEQ ID NO: 36820 - DNA, 15 bp, Homo sapiens
atttgaacccatgta

SEQ ID NO: 36821 - DNA, 15 bp, Homo sapiens
tttgaacccatgtag

SEQ ID NO: 36822 - DNA, 15 bp, Homo sapiens
ttgaacccatgtagc

SEQ ID NO: 36823 - DNA, 15 bp, Homo sapiens
tgaacccatgtagcc

SEQ ID NO: 36824 - DNA, 15 bp, Homo sapiens
gaacccatgtagcca

SEQ ID NO: 36825 - DNA, 15 bp, Homo sapiens
aacccatgtagccag

SEQ ID NO: 36826 - DNA, 15 bp, Homo sapiens
acccatgtagccagg

SEQ ID NO: 36827 - DNA, 15 bp, Homo sapiens
cccatgtagccaggc

SEQ ID NO: 36828 - DNA, 15 bp, Homo sapiens
ccatgtagccaggct

SEQ ID NO: 36829 - DNA, 15 bp, Homo sapiens
catgtagccaggctc

SEQ ID NO: 36830 - DNA, 15 bp, Homo sapiens
atgtagccaggctct

SEQ ID NO: 36831 - DNA, 15 bp, Homo sapiens
tgtagccaggctcta

SEQ ID NO: 36832 - DNA, 15 bp, Homo sapiens
gtagccaggctctag

SEQ ID NO: 36833 - DNA, 15 bp, Homo sapiens
tagccaggctctaga

SEQ ID NO: 36834 - DNA, 15 bp, Homo sapiens
agccaggctctagaa

SEQ ID NO: 36835 - DNA, 15 bp, Homo sapiens
gccaggctctagaat

SEQ ID NO: 36836 - DNA, 15 bp, Homo sapiens
ccaggctctagaatc

SEQ ID NO: 36837 - DNA, 15 bp, Homo sapiens
caggctctagaatct

SEQ ID NO: 36838 - DNA, 15 bp, Homo sapiens
aggctctagaatctg

SEQ ID NO: 36839 - DNA, 15 bp, Homo sapiens
ggctctagaatctgc

SEQ ID NO: 36840 - DNA, 15 bp, Homo sapiens
gctctagaatctgca

SEQ ID NO: 36841 - DNA, 15 bp, Homo sapiens
ctctagaatctgcac

SEQ ID NO: 36842 - DNA, 15 bp, Homo sapiens
tctagaatctgcact

SEQ ID NO: 36843 - DNA, 15 bp, Homo sapiens
ctagaatctgcactc

SEQ ID NO: 36844 - DNA, 15 bp, Homo sapiens
tagaatctgcactcc

SEQ ID NO: 36845 - DNA, 15 bp, Homo sapiens
agaatctgcactcct

SEQ ID NO: 36846 - DNA, 15 bp, Homo sapiens
gaatctgcactcctg

SEQ ID NO: 36847 - DNA, 15 bp, Homo sapiens
aatctgcactcctgc

SEQ ID NO: 36848 - DNA, 15 bp, Homo sapiens
atctgcactcctgct

SEQ ID NO: 36849 - DNA, 15 bp, Homo sapiens
tctgcactcctgctt

SEQ ID NO: 36850 - DNA, 15 bp, Homo sapiens
ctgcactcctgcttt

SEQ ID NO: 36851 - DNA, 15 bp, Homo sapiens
tgcactcctgctttg

SEQ ID NO: 36852 - DNA, 15 bp, Homo sapiens
gcactcctgctttgc

SEQ ID NO: 36853 - DNA, 15 bp, Homo sapiens
cactcctgctttgcc

SEQ ID NO: 36854 - DNA, 15 bp, Homo sapiens
actcctgctttgccc

SEQ ID NO: 36855 - DNA, 15 bp, Homo sapiens
ctcctgctttgccct

SEQ ID NO: 36856 - DNA, 15 bp, Homo sapiens
tcctgctttgccctg

SEQ ID NO: 36857 - DNA, 15 bp, Homo sapiens
cctgctttgccctgc

SEQ ID NO: 36858 - DNA, 15 bp, Homo sapiens
ctgctttgccctgct

SEQ ID NO: 36859 - DNA, 15 bp, Homo sapiens
tgctttgccctgcta

SEQ ID NO: 36860 - DNA, 15 bp, Homo sapiens
gctttgccctgctac

SEQ ID NO: 36861 - DNA, 15 bp, Homo sapiens
ctttgccctgctact

SEQ ID NO: 36862 - DNA, 15 bp, Homo sapiens
tttgccctgctactc

SEQ ID NO: 36863 - DNA, 15 bp, Homo sapiens
ttgccctgctactcc

SEQ ID NO: 36864 - DNA, 15 bp, Homo sapiens
tgccctgctactcct

SEQ ID NO: 36865 - DNA, 15 bp, Homo sapiens
gccctgctactcctc

SEQ ID NO: 36866 - DNA, 15 bp, Homo sapiens
ccctgctactcctca

SEQ ID NO: 36867 - DNA, 15 bp, Homo sapiens
cctgctactcctcat

SEQ ID NO: 36868 - DNA, 15 bp, Homo sapiens
ctgctactcctcatg

SEQ ID NO: 36869 - DNA, 15 bp, Homo sapiens
tgctactcctcatgc

SEQ ID NO: 36870 - DNA, 15 bp, Homo sapiens
gctactcctcatgcc

SEQ ID NO: 36871 - DNA, 15 bp, Homo sapiens
ctactcctcatgcca

SEQ ID NO: 36872 - DNA, 15 bp, Homo sapiens
tactcctcatgccaa

SEQ ID NO: 36873 - DNA, 15 bp, Homo sapiens
actcctcatgccaac

SEQ ID NO: 36874 - DNA, 15 bp, Homo sapiens
ctcctcatgccaaca

SEQ ID NO: 36875 - DNA, 15 bp, Homo sapiens
tcctcatgccaacat

SEQ ID NO: 36876 - DNA, 15 bp, Homo sapiens
cctcatgccaacatg

SEQ ID NO: 36877 - DNA, 15 bp, Homo sapiens
ctcatgccaacatgc

SEQ ID NO: 36878 - DNA, 15 bp, Homo sapiens
tcatgccaacatgcc

SEQ ID NO: 36879 - DNA, 15 bp, Homo sapiens
catgccaacatgcca

SEQ ID NO: 36880 - DNA, 15 bp, Homo sapiens
atgccaacatgccag

SEQ ID NO: 36881 - DNA, 15 bp, Homo sapiens
tgccaacatgccagc

SEQ ID NO: 36882 - DNA, 15 bp, Homo sapiens
gccaacatgccagcc

SEQ ID NO: 36883 - DNA, 15 bp, Homo sapiens
ccaacatgccagcct

SEQ ID NO: 36884 - DNA, 15 bp, Homo sapiens
caacatgccagcctt

SEQ ID NO: 36885 - DNA, 15 bp, Homo sapiens
aacatgccagcctta

SEQ ID NO: 36886 - DNA, 15 bp, Homo sapiens
acatgccagccttat

SEQ ID NO: 36887 - DNA, 15 bp, Homo sapiens
catgccagccttatt

SEQ ID NO: 36888 - DNA, 15 bp, Homo sapiens
atgccagccttattc

SEQ ID NO: 36889 - DNA, 15 bp, Homo sapiens
tgccagccttattcc

SEQ ID NO: 36890 - DNA, 15 bp, Homo sapiens
gccagccttattcca

SEQ ID NO: 36891 - DNA, 15 bp, Homo sapiens
ccagccttattccac

SEQ ID NO: 36892 - DNA, 15 bp, Homo sapiens
cagccttattccact

SEQ ID NO: 36893 - DNA, 15 bp, Homo sapiens
agccttattccactg

SEQ ID NO: 36894 - DNA, 15 bp, Homo sapiens
gccttattccactgt

SEQ ID NO: 36895 - DNA, 15 bp, Homo sapiens
ccttattccactgtt

SEQ ID NO: 36896 - DNA, 15 bp, Homo sapiens
cttattccactgttc

SEQ ID NO: 36897 - DNA, 15 bp, Homo sapiens
ttattccactgttcc

SEQ ID NO: 36898 - DNA, 15 bp, Homo sapiens
tattccactgttccc

SEQ ID NO: 36899 - DNA, 15 bp, Homo sapiens
attccactgttccca

SEQ ID NO: 36900 - DNA, 15 bp, Homo sapiens
ttccactgttcccaa

SEQ ID NO: 36901 - DNA, 15 bp, Homo sapiens
tccactgttcccaaa

SEQ ID NO: 36902 - DNA, 15 bp, Homo sapiens
ccactgttcccaaag

SEQ ID NO: 36903 - DNA, 15 bp, Homo sapiens
cactgttcccaaagt

SEQ ID NO: 36904 - DNA, 15 bp, Homo sapiens
actgttcccaaagtt

SEQ ID NO: 36905 - DNA, 15 bp, Homo sapiens
ctgttcccaaagttc

SEQ ID NO: 36906 - DNA, 15 bp, Homo sapiens
tgttcccaaagttct

SEQ ID NO: 36907 - DNA, 15 bp, Homo sapiens
gttcccaaagttcta

SEQ ID NO: 36908 - DNA, 15 bp, Homo sapiens
ttcccaaagttctag

SEQ ID NO: 36909 - DNA, 15 bp, Homo sapiens
tcccaaagttctagc

SEQ ID NO: 36910 - DNA, 15 bp, Homo sapiens
cccaaagttctagct

SEQ ID NO: 36911 - DNA, 15 bp, Homo sapiens
ccaaagttctagctc

SEQ ID NO: 36912 - DNA, 15 bp, Homo sapiens
caaagttctagctcc

SEQ ID NO: 36913 - DNA, 15 bp, Homo sapiens
aaagttctagctcct

SEQ ID NO: 36914 - DNA, 15 bp, Homo sapiens
aagttctagctcctc

SEQ ID NO: 36915 - DNA, 15 bp, Homo sapiens
agttctagctcctct

SEQ ID NO: 36916 - DNA, 15 bp, Homo sapiens
gttctagctcctcta

SEQ ID NO: 36917 - DNA, 15 bp, Homo sapiens
ttctagctcctctag

SEQ ID NO: 36918 - DNA, 15 bp, Homo sapiens
tctagctcctctaga

SEQ ID NO: 36919 - DNA, 15 bp, Homo sapiens
ctagctcctctagat

SEQ ID NO: 36920 - DNA, 15 bp, Homo sapiens
tagctcctctagatg

SEQ ID NO: 36921 - DNA, 15 bp, Homo sapiens
agctcctctagatgg

SEQ ID NO: 36922 - DNA, 15 bp, Homo sapiens
gctcctctagatggc

SEQ ID NO: 36923 - DNA, 15 bp, Homo sapiens
ctcctctagatggct

SEQ ID NO: 36924 - DNA, 15 bp, Homo sapiens
tcctctagatggctg

SEQ ID NO: 36925 - DNA, 15 bp, Homo sapiens
cctctagatggctgc

SEQ ID NO: 36926 - DNA, 15 bp, Homo sapiens
ctctagatggctgct

SEQ ID NO: 36927 - DNA, 15 bp, Homo sapiens
tctagatggctgctg

SEQ ID NO: 36928 - DNA, 15 bp, Homo sapiens
ctagatggctgctgc

SEQ ID NO: 36929 - DNA, 15 bp, Homo sapiens
tagatggctgctgct

SEQ ID NO: 36930 - DNA, 15 bp, Homo sapiens
agatggctgctgctg

SEQ ID NO: 36931 - DNA, 15 bp, Homo sapiens
gatggctgctgctgc

SEQ ID NO: 36932 - DNA, 15 bp, Homo sapiens
atggctgctgctgcc

SEQ ID NO: 36933 - DNA, 15 bp, Homo sapiens
tggctgctgctgcct

SEQ ID NO: 36934 - DNA, 15 bp, Homo sapiens
ggctgctgctgcctc

SEQ ID NO: 36935 - DNA, 15 bp, Homo sapiens
gctgctgctgcctcc

SEQ ID NO: 36936 - DNA, 15 bp, Homo sapiens
ctgctgctgcctccc

SEQ ID NO: 36937 - DNA, 15 bp, Homo sapiens
tgctgctgcctcccc

SEQ ID NO: 36938 - DNA, 15 bp, Homo sapiens
gctgctgcctcccct

SEQ ID NO: 36939 - DNA, 15 bp, Homo sapiens
ctgctgcctcccctc

SEQ ID NO: 36940 - DNA, 15 bp, Homo sapiens
tgctgcctcccctca

SEQ ID NO: 36941 - DNA, 15 bp, Homo sapiens
gctgcctcccctcag

SEQ ID NO: 36942 - DNA, 15 bp, Homo sapiens
ctgcctcccctcagt

SEQ ID NO: 36943 - DNA, 15 bp, Homo sapiens
tgcctcccctcagtc

SEQ ID NO: 36944 - DNA, 15 bp, Homo sapiens
gcctcccctcagtcc

SEQ ID NO: 36945 - DNA, 15 bp, Homo sapiens
cctcccctcagtccc

SEQ ID NO: 36946 - DNA, 15 bp, Homo sapiens
ctcccctcagtcccc

SEQ ID NO: 36947 - DNA, 15 bp, Homo sapiens
tcccctcagtccccc

SEQ ID NO: 36948 - DNA, 15 bp, Homo sapiens
cccctcagtcccccc

SEQ ID NO: 36949 - DNA, 15 bp, Homo sapiens
ccctcagtcccccca

SEQ ID NO: 36950 - DNA, 15 bp, Homo sapiens
cctcagtccccccat

SEQ ID NO: 36951 - DNA, 15 bp, Homo sapiens
ctcagtccccccata

SEQ ID NO: 36952 - DNA, 15 bp, Homo sapiens
tcagtccccccatat

SEQ ID NO: 36953 - DNA, 15 bp, Homo sapiens
cagtccccccatatg

SEQ ID NO: 36954 - DNA, 15 bp, Homo sapiens
agtccccccatatgt

SEQ ID NO: 36955 - DNA, 15 bp, Homo sapiens
gtccccccatatgtc

SEQ ID NO: 36956 - DNA, 15 bp, Homo sapiens
tccccccatatgtct

SEQ ID NO: 36957 - DNA, 15 bp, Homo sapiens
ccccccatatgtctc

SEQ ID NO: 36958 - DNA, 15 bp, Homo sapiens
cccccatatgtctct

SEQ ID NO: 36959 - DNA, 15 bp, Homo sapiens
ccccatatgtctctc

SEQ ID NO: 36960 - DNA, 15 bp, Homo sapiens
cccatatgtctctct

SEQ ID NO: 36961 - DNA, 15 bp, Homo sapiens
ccatatgtctctctc

SEQ ID NO: 36962 - DNA, 15 bp, Homo sapiens
catatgtctctctct

SEQ ID NO: 36963 - DNA, 15 bp, Homo sapiens
atatgtctctctctc

SEQ ID NO: 36964 - DNA, 15 bp, Homo sapiens
tatgtctctctctct

SEQ ID NO: 36965 - DNA, 15 bp, Homo sapiens
atgtctctctctctc

SEQ ID NO: 36966 - DNA, 15 bp, Homo sapiens
tgtctctctctctct

SEQ ID NO: 36967 - DNA, 15 bp, Homo sapiens
gtctctctctctctc

SEQ ID NO: 36968 - DNA, 15 bp, Homo sapiens
tctctctctctctct

SEQ ID NO: 36969 - DNA, 15 bp, Homo sapiens
ctctctctctctctc

SEQ ID NO: 36970 - DNA, 15 bp, Homo sapiens
ctctctctctctctt

SEQ ID NO: 36971 - DNA, 15 bp, Homo sapiens
tctctctctctcttt

SEQ ID NO: 36972 - DNA, 15 bp, Homo sapiens
ctctctctctctttc

SEQ ID NO: 36973 - DNA, 15 bp, Homo sapiens
tctctctctctttct

SEQ ID NO: 36974 - DNA, 15 bp, Homo sapiens
ctctctctctttctc

SEQ ID NO: 36975 - DNA, 15 bp, Homo sapiens
tctctctctttctct

SEQ ID NO: 36976 - DNA, 15 bp, Homo sapiens
ctctctctttctctc

SEQ ID NO: 36977 - DNA, 15 bp, Homo sapiens
tctctctttctctct

SEQ ID NO: 36978 - DNA, 15 bp, Homo sapiens
ctctctttctctctc

SEQ ID NO: 36979 - DNA, 15 bp, Homo sapiens
tctctttctctctct

SEQ ID NO: 36980 - DNA, 15 bp, Homo sapiens
ctctttctctctctc

SEQ ID NO: 36981 - DNA, 15 bp, Homo sapiens
tctttctctctctct

SEQ ID NO: 36982 - DNA, 15 bp, Homo sapiens
ctttctctctctctc

SEQ ID NO: 36983 - DNA, 15 bp, Homo sapiens
tttctctctctctca

SEQ ID NO: 36984 - DNA, 15 bp, Homo sapiens
ttctctctctctcac

SEQ ID NO: 36985 - DNA, 15 bp, Homo sapiens
tctctctctctcaca

SEQ ID NO: 36986 - DNA, 15 bp, Homo sapiens
ctctctctctcacac

SEQ ID NO: 36987 - DNA, 15 bp, Homo sapiens
tctctctctcacaca

SEQ ID NO: 36988 - DNA, 15 bp, Homo sapiens
ctctctctcacacac

SEQ ID NO: 36989 - DNA, 15 bp, Homo sapiens
tctctctcacacaca

SEQ ID NO: 36990 - DNA, 15 bp, Homo sapiens
ctctctcacacacac

SEQ ID NO: 36991 - DNA, 15 bp, Homo sapiens
tctctcacacacaca

SEQ ID NO: 36992 - DNA, 15 bp, Homo sapiens
ctctcacacacacac

SEQ ID NO: 36993 - DNA, 15 bp, Homo sapiens
tctcacacacacaca

SEQ ID NO: 36994 - DNA, 15 bp, Homo sapiens
ctcacacacacacac

SEQ ID NO: 36995 - DNA, 15 bp, Homo sapiens
tcacacacacacaca

SEQ ID NO: 36996 - DNA, 15 bp, Homo sapiens
cacacacacacacaa

SEQ ID NO: 36997 - DNA, 15 bp, Homo sapiens
acacacacacacaaa

SEQ ID NO: 36998 - DNA, 15 bp, Homo sapiens
cacacacacacaaat

SEQ ID NO: 36999 - DNA, 15 bp, Homo sapiens
acacacacacaaata

SEQ ID NO: 37000 - DNA, 15 bp, Homo sapiens
cacacacacaaatac

SEQ ID NO: 37001 - DNA, 15 bp, Homo sapiens
acacacacaaataca

SEQ ID NO: 37002 - DNA, 15 bp, Homo sapiens
cacacacaaatacac

SEQ ID NO: 37003 - DNA, 15 bp, Homo sapiens
acacacaaatacaca

SEQ ID NO: 37004 - DNA, 15 bp, Homo sapiens
cacacaaatacacac

SEQ ID NO: 37005 - DNA, 15 bp, Homo sapiens
acacaaatacacacc

SEQ ID NO: 37006 - DNA, 15 bp, Homo sapiens
cacaaatacacacca

SEQ ID NO: 37007 - DNA, 15 bp, Homo sapiens
acaaatacacaccac

SEQ ID NO: 37008 - DNA, 15 bp, Homo sapiens
caaatacacaccaca

SEQ ID NO: 37009 - DNA, 15 bp, Homo sapiens
aaatacacaccacac

SEQ ID NO: 37010 - DNA, 15 bp, Homo sapiens
aatacacaccacact

SEQ ID NO: 37011 - DNA, 15 bp, Homo sapiens
atacacaccacacta

SEQ ID NO: 37012 - DNA, 15 bp, Homo sapiens
tacacaccacactac

SEQ ID NO: 37013 - DNA, 15 bp, Homo sapiens
acacaccacactaca

SEQ ID NO: 37014 - DNA, 15 bp, Homo sapiens
cacaccacactacac

SEQ ID NO: 37015 - DNA, 15 bp, Homo sapiens
acaccacactacaca

SEQ ID NO: 37016 - DNA, 15 bp, Homo sapiens
caccacactacacac

SEQ ID NO: 37017 - DNA, 15 bp, Homo sapiens
accacactacacaca

SEQ ID NO: 37018 - DNA, 15 bp, Homo sapiens
ccacactacacacaa

SEQ ID NO: 37019 - DNA, 15 bp, Homo sapiens
cacactacacacaac

SEQ ID NO: 37020 - DNA, 15 bp, Homo sapiens
acactacacacaacc

SEQ ID NO: 37021 - DNA, 15 bp, Homo sapiens
cactacacacaaccc

SEQ ID NO: 37022 - DNA, 15 bp, Homo sapiens
actacacacaaccct

SEQ ID NO: 37023 - DNA, 15 bp, Homo sapiens
ctacacacaaccctt

SEQ ID NO: 37024 - DNA, 15 bp, Homo sapiens
tacacacaaccctta

SEQ ID NO: 37025 - DNA, 15 bp, Homo sapiens
acacacaacccttag

SEQ ID NO: 37026 - DNA, 15 bp, Homo sapiens
cacacaacccttagc

SEQ ID NO: 37027 - DNA, 15 bp, Homo sapiens
acacaacccttagca

SEQ ID NO: 37028 - DNA, 15 bp, Homo sapiens
cacaacccttagcag

SEQ ID NO: 37029 - DNA, 15 bp, Homo sapiens
acaacccttagcagc

SEQ ID NO: 37030 - DNA, 15 bp, Homo sapiens
caacccttagcagca

SEQ ID NO: 37031 - DNA, 15 bp, Homo sapiens
aacccttagcagcaa

SEQ ID NO: 37032 - DNA, 15 bp, Homo sapiens
acccttagcagcaac

SEQ ID NO: 37033 - DNA, 15 bp, Homo sapiens
cccttagcagcaacc

SEQ ID NO: 37034 - DNA, 15 bp, Homo sapiens
ccttagcagcaaccc

SEQ ID NO: 37035 - DNA, 15 bp, Homo sapiens
cttagcagcaacccc

SEQ ID NO: 37036 - DNA, 15 bp, Homo sapiens
ttagcagcaacccca

SEQ ID NO: 37037 - DNA, 15 bp, Homo sapiens
tagcagcaaccccac

SEQ ID NO: 37038 - DNA, 15 bp, Homo sapiens
agcagcaaccccaca

SEQ ID NO: 37039 - DNA, 15 bp, Homo sapiens
gcagcaaccccacat

SEQ ID NO: 37040 - DNA, 15 bp, Homo sapiens
cagcaaccccacatg

SEQ ID NO: 37041 - DNA, 15 bp, Homo sapiens
agcaaccccacatgt

SEQ ID NO: 37042 - DNA, 15 bp, Homo sapiens
gcaaccccacatgtc

SEQ ID NO: 37043 - DNA, 15 bp, Homo sapiens
caaccccacatgtcc

SEQ ID NO: 37044 - DNA, 15 bp, Homo sapiens
aaccccacatgtcct

SEQ ID NO: 37045 - DNA, 15 bp, Homo sapiens
accccacatgtcctg

SEQ ID NO: 37046 - DNA, 15 bp, Homo sapiens
ccccacatgtcctgt

SEQ ID NO: 37047 - DNA, 15 bp, Homo sapiens
cccacatgtcctgtc

SEQ ID NO: 37048 - DNA, 15 bp, Homo sapiens
ccacatgtcctgtcc

SEQ ID NO: 37049 - DNA, 15 bp, Homo sapiens
cacatgtcctgtcct

SEQ ID NO: 37050 - DNA, 15 bp, Homo sapiens
acatgtcctgtcctc

SEQ ID NO: 37051 - DNA, 15 bp, Homo sapiens
catgtcctgtcctcc

SEQ ID NO: 37052 - DNA, 15 bp, Homo sapiens
atgtcctgtcctcct

SEQ ID NO: 37053 - DNA, 15 bp, Homo sapiens
tgtcctgtcctcctt

SEQ ID NO: 37054 - DNA, 15 bp, Homo sapiens
gtcctgtcctccttg

SEQ ID NO: 37055 - DNA, 15 bp, Homo sapiens
tcctgtcctccttgc

SEQ ID NO: 37056 - DNA, 15 bp, Homo sapiens
cctgtcctccttgca

SEQ ID NO: 37057 - DNA, 15 bp, Homo sapiens
ctgtcctccttgcag

SEQ ID NO: 37058 - DNA, 15 bp, Homo sapiens
tgtcctccttgcagc

SEQ ID NO: 37059 - DNA, 15 bp, Homo sapiens
gtcctccttgcagcc

SEQ ID NO: 37060 - DNA, 15 bp, Homo sapiens
tcctccttgcagcca

SEQ ID NO: 37061 - DNA, 15 bp, Homo sapiens
cctccttgcagccag

SEQ ID NO: 37062 - DNA, 15 bp, Homo sapiens
ctccttgcagccagg

SEQ ID NO: 37063 - DNA, 15 bp, Homo sapiens
tccttgcagccaggc

SEQ ID NO: 37064 - DNA, 15 bp, Homo sapiens
ccttgcagccaggcc

SEQ ID NO: 37065 - DNA, 15 bp, Homo sapiens
cttgcagccaggcct

SEQ ID NO: 37066 - DNA, 15 bp, Homo sapiens
ttgcagccaggcctt

SEQ ID NO: 37067 - DNA, 15 bp, Homo sapiens
tgcagccaggccttt

SEQ ID NO: 37068 - DNA, 15 bp, Homo sapiens
gcagccaggcctttg

SEQ ID NO: 37069 - DNA, 15 bp, Homo sapiens
cagccaggcctttgc

SEQ ID NO: 37070 - DNA, 15 bp, Homo sapiens
agccaggcctttgca

SEQ ID NO: 37071 - DNA, 15 bp, Homo sapiens
gccaggcctttgcac

SEQ ID NO: 37072 - DNA, 15 bp, Homo sapiens
ccaggcctttgcaca

SEQ ID NO: 37073 - DNA, 15 bp, Homo sapiens
caggcctttgcacag

SEQ ID NO: 37074 - DNA, 15 bp, Homo sapiens
aggcctttgcacagg

SEQ ID NO: 37075 - DNA, 15 bp, Homo sapiens
ggcctttgcacaggc

SEQ ID NO: 37076 - DNA, 15 bp, Homo sapiens
gcctttgcacaggcc

SEQ ID NO: 37077 - DNA, 15 bp, Homo sapiens
cctttgcacaggccg

SEQ ID NO: 37078 - DNA, 15 bp, Homo sapiens
ctttgcacaggccgt

SEQ ID NO: 37079 - DNA, 15 bp, Homo sapiens
tttgcacaggccgtc

SEQ ID NO: 37080 - DNA, 15 bp, Homo sapiens
ttgcacaggccgtcc

SEQ ID NO: 37081 - DNA, 15 bp, Homo sapiens
tgcacaggccgtccc

SEQ ID NO: 37082 - DNA, 15 bp, Homo sapiens
gcacaggccgtccct

SEQ ID NO: 37083 - DNA, 15 bp, Homo sapiens
cacaggccgtccctc

SEQ ID NO: 37084 - DNA, 15 bp, Homo sapiens
acaggccgtccctcc

SEQ ID NO: 37085 - DNA, 15 bp, Homo sapiens
caggccgtccctcca

SEQ ID NO: 37086 - DNA, 15 bp, Homo sapiens
aggccgtccctccac

SEQ ID NO: 37087 - DNA, 15 bp, Homo sapiens
ggccgtccctccacc

SEQ ID NO: 37088 - DNA, 15 bp, Homo sapiens
gccgtccctccaccc

SEQ ID NO: 37089 - DNA, 15 bp, Homo sapiens
ccgtccctccaccca

SEQ ID NO: 37090 - DNA, 15 bp, Homo sapiens
cgtccctccacccag

SEQ ID NO: 37091 - DNA, 15 bp, Homo sapiens
gtccctccacccaga

SEQ ID NO: 37092 - DNA, 15 bp, Homo sapiens
tccctccacccagaa

SEQ ID NO: 37093 - DNA, 15 bp, Homo sapiens
ccctccacccagaat

SEQ ID NO: 37094 - DNA, 15 bp, Homo sapiens
cctccacccagaatg

SEQ ID NO: 37095 - DNA, 15 bp, Homo sapiens
ctccacccagaatgc

SEQ ID NO: 37096 - DNA, 15 bp, Homo sapiens
tccacccagaatgct

SEQ ID NO: 37097 - DNA, 15 bp, Homo sapiens
ccacccagaatgctt

SEQ ID NO: 37098 - DNA, 15 bp, Homo sapiens
cacccagaatgcttt

SEQ ID NO: 37099 - DNA, 15 bp, Homo sapiens
acccagaatgctttg

SEQ ID NO: 37100 - DNA, 15 bp, Homo sapiens
cccagaatgctttgc

SEQ ID NO: 37101 - DNA, 15 bp, Homo sapiens
ccagaatgctttgcc

SEQ ID NO: 37102 - DNA, 15 bp, Homo sapiens
cagaatgctttgccc

SEQ ID NO: 37103 - DNA, 15 bp, Homo sapiens
agaatgctttgccca

SEQ ID NO: 37104 - DNA, 15 bp, Homo sapiens
gaatgctttgcccac

SEQ ID NO: 37105 - DNA, 15 bp, Homo sapiens
aatgctttgcccact

SEQ ID NO: 37106 - DNA, 15 bp, Homo sapiens
atgctttgcccactc

SEQ ID NO: 37107 - DNA, 15 bp, Homo sapiens
tgctttgcccactct

SEQ ID NO: 37108 - DNA, 15 bp, Homo sapiens
gctttgcccactctc

SEQ ID NO: 37109 - DNA, 15 bp, Homo sapiens
ctttgcccactctca

SEQ ID NO: 37110 - DNA, 15 bp, Homo sapiens
tttgcccactctcac

SEQ ID NO: 37111 - DNA, 15 bp, Homo sapiens
ttgcccactctcacc

SEQ ID NO: 37112 - DNA, 15 bp, Homo sapiens
tgcccactctcacct

SEQ ID NO: 37113 - DNA, 15 bp, Homo sapiens
gcccactctcacctc

SEQ ID NO: 37114 - DNA, 15 bp, Homo sapiens
cccactctcacctcc

SEQ ID NO: 37115 - DNA, 15 bp, Homo sapiens
ccactctcacctccc

SEQ ID NO: 37116 - DNA, 15 bp, Homo sapiens
cactctcacctccct

SEQ ID NO: 37117 - DNA, 15 bp, Homo sapiens
actctcacctccctg

SEQ ID NO: 37118 - DNA, 15 bp, Homo sapiens
ctctcacctccctgg

SEQ ID NO: 37119 - DNA, 15 bp, Homo sapiens
tctcacctccctggc

SEQ ID NO: 37120 - DNA, 15 bp, Homo sapiens
ctcacctccctggcc

SEQ ID NO: 37121 - DNA, 15 bp, Homo sapiens
tcacctccctggccc

SEQ ID NO: 37122 - DNA, 15 bp, Homo sapiens
cacctccctggccca

SEQ ID NO: 37123 - DNA, 15 bp, Homo sapiens
acctccctggcccat

SEQ ID NO: 37124 - DNA, 15 bp, Homo sapiens
cctccctggcccatt

SEQ ID NO: 37125 - DNA, 15 bp, Homo sapiens
ctccctggcccattc

SEQ ID NO: 37126 - DNA, 15 bp, Homo sapiens
tccctggcccattct

SEQ ID NO: 37127 - DNA, 15 bp, Homo sapiens
ccctggcccattctc

SEQ ID NO: 37128 - DNA, 15 bp, Homo sapiens
cctggcccattctca

SEQ ID NO: 37129 - DNA, 15 bp, Homo sapiens
ctggcccattctcaa

SEQ ID NO: 37130 - DNA, 15 bp, Homo sapiens
tggcccattctcaac

SEQ ID NO: 37131 - DNA, 15 bp, Homo sapiens
ggcccattctcaact

SEQ ID NO: 37132 - DNA, 15 bp, Homo sapiens
gcccattctcaactc

SEQ ID NO: 37133 - DNA, 15 bp, Homo sapiens
cccattctcaactca

SEQ ID NO: 37134 - DNA, 15 bp, Homo sapiens
ccattctcaactcac

SEQ ID NO: 37135 - DNA, 15 bp, Homo sapiens
cattctcaactcacc

SEQ ID NO: 37136 - DNA, 15 bp, Homo sapiens
attctcaactcacca

SEQ ID NO: 37137 - DNA, 15 bp, Homo sapiens
ttctcaactcaccac

SEQ ID NO: 37138 - DNA, 15 bp, Homo sapiens
tctcaactcaccaca

SEQ ID NO: 37139 - DNA, 15 bp, Homo sapiens
ctcaactcaccacac

SEQ ID NO: 37140 - DNA, 15 bp, Homo sapiens
tcaactcaccacact

SEQ ID NO: 37141 - DNA, 15 bp, Homo sapiens
caactcaccacactt

SEQ ID NO: 37142 - DNA, 15 bp, Homo sapiens
aactcaccacacttc

SEQ ID NO: 37143 - DNA, 15 bp, Homo sapiens
actcaccacacttcc

SEQ ID NO: 37144 - DNA, 15 bp, Homo sapiens
ctcaccacacttcca

SEQ ID NO: 37145 - DNA, 15 bp, Homo sapiens
tcaccacacttccaa

SEQ ID NO: 37146 - DNA, 15 bp, Homo sapiens
caccacacttccaac

SEQ ID NO: 37147 - DNA, 15 bp, Homo sapiens
accacacttccaaca

SEQ ID NO: 37148 - DNA, 15 bp, Homo sapiens
ccacacttccaacat

SEQ ID NO: 37149 - DNA, 15 bp, Homo sapiens
cacacttccaacatt

SEQ ID NO: 37150 - DNA, 15 bp, Homo sapiens
acacttccaacatta

SEQ ID NO: 37151 - DNA, 15 bp, Homo sapiens
cacttccaacattat

SEQ ID NO: 37152 - DNA, 15 bp, Homo sapiens
acttccaacattatc

SEQ ID NO: 37153 - DNA, 15 bp, Homo sapiens
cttccaacattatct

SEQ ID NO: 37154 - DNA, 15 bp, Homo sapiens
ttccaacattatctc

SEQ ID NO: 37155 - DNA, 15 bp, Homo sapiens
tccaacattatctcc

SEQ ID NO: 37156 - DNA, 15 bp, Homo sapiens
ccaacattatctcca

SEQ ID NO: 37157 - DNA, 15 bp, Homo sapiens
caacattatctccag

SEQ ID NO: 37158 - DNA, 15 bp, Homo sapiens
aacattatctccagc

SEQ ID NO: 37159 - DNA, 15 bp, Homo sapiens
acattatctccagca

SEQ ID NO: 37160 - DNA, 15 bp, Homo sapiens
cattatctccagcac

SEQ ID NO: 37161 - DNA, 15 bp, Homo sapiens
attatctccagcact

SEQ ID NO: 37162 - DNA, 15 bp, Homo sapiens
ttatctccagcactc

SEQ ID NO: 37163 - DNA, 15 bp, Homo sapiens
tatctccagcactct

SEQ ID NO: 37164 - DNA, 15 bp, Homo sapiens
atctccagcactctg

SEQ ID NO: 37165 - DNA, 15 bp, Homo sapiens
tctccagcactctgg

SEQ ID NO: 37166 - DNA, 15 bp, Homo sapiens
ctccagcactctggc

SEQ ID NO: 37167 - DNA, 15 bp, Homo sapiens
tccagcactctggcc

SEQ ID NO: 37168 - DNA, 15 bp, Homo sapiens
ccagcactctggcca

SEQ ID NO: 37169 - DNA, 15 bp, Homo sapiens
cagcactctggccag

SEQ ID NO: 37170 - DNA, 15 bp, Homo sapiens
agcactctggccagg

SEQ ID NO: 37171 - DNA, 15 bp, Homo sapiens
gcactctggccaggc

SEQ ID NO: 37172 - DNA, 15 bp, Homo sapiens
cactctggccaggct

SEQ ID NO: 37173 - DNA, 15 bp, Homo sapiens
actctggccaggctc

SEQ ID NO: 37174 - DNA, 15 bp, Homo sapiens
ctctggccaggctca

SEQ ID NO: 37175 - DNA, 15 bp, Homo sapiens
tctggccaggctcaa

SEQ ID NO: 37176 - DNA, 15 bp, Homo sapiens
ctggccaggctcaag

SEQ ID NO: 37177 - DNA, 15 bp, Homo sapiens
tggccaggctcaagt

SEQ ID NO: 37178 - DNA, 15 bp, Homo sapiens
ggccaggctcaagtg

SEQ ID NO: 37179 - DNA, 15 bp, Homo sapiens
gccaggctcaagtgg

SEQ ID NO: 37180 - DNA, 15 bp, Homo sapiens
ccaggctcaagtggt

SEQ ID NO: 37181 - DNA, 15 bp, Homo sapiens
caggctcaagtggtg

SEQ ID NO: 37182 - DNA, 15 bp, Homo sapiens
aggctcaagtggtga

SEQ ID NO: 37183 - DNA, 15 bp, Homo sapiens
ggctcaagtggtgag

SEQ ID NO: 37184 - DNA, 15 bp, Homo sapiens
gctcaagtggtgagt

SEQ ID NO: 37185 - DNA, 15 bp, Homo sapiens
ctcaagtggtgagtt

SEQ ID NO: 37186 - DNA, 15 bp, Homo sapiens
tcaagtggtgagttc

SEQ ID NO: 37187 - DNA, 15 bp, Homo sapiens
caagtggtgagttca

SEQ ID NO: 37188 - DNA, 15 bp, Homo sapiens
aagtggtgagttcag

SEQ ID NO: 37189 - DNA, 15 bp, Homo sapiens
agtggtgagttcagg

SEQ ID NO: 37190 - DNA, 15 bp, Homo sapiens
gtggtgagttcaggc

SEQ ID NO: 37191 - DNA, 15 bp, Homo sapiens
tggtgagttcaggcc

SEQ ID NO: 37192 - DNA, 15 bp, Homo sapiens
ggtgagttcaggcct

SEQ ID NO: 37193 - DNA, 15 bp, Homo sapiens
gtgagttcaggcctg

SEQ ID NO: 37194 - DNA, 15 bp, Homo sapiens
tgagttcaggcctga

SEQ ID NO: 37195 - DNA, 15 bp, Homo sapiens
gagttcaggcctgac

SEQ ID NO: 37196 - DNA, 15 bp, Homo sapiens
agttcaggcctgaca

SEQ ID NO: 37197 - DNA, 15 bp, Homo sapiens
gttcaggcctgacat

SEQ ID NO: 37198 - DNA, 15 bp, Homo sapiens
ttcaggcctgacatg

SEQ ID NO: 37199 - DNA, 15 bp, Homo sapiens
tcaggcctgacatgc

SEQ ID NO: 37200 - DNA, 15 bp, Homo sapiens
caggcctgacatgca

SEQ ID NO: 37201 - DNA, 15 bp, Homo sapiens
aggcctgacatgcag

SEQ ID NO: 37202 - DNA, 15 bp, Homo sapiens
ggcctgacatgcagt

SEQ ID NO: 37203 - DNA, 15 bp, Homo sapiens
gcctgacatgcagta

SEQ ID NO: 37204 - DNA, 15 bp, Homo sapiens
cctgacatgcagtag

SEQ ID NO: 37205 - DNA, 15 bp, Homo sapiens
ctgacatgcagtagg

SEQ ID NO: 37206 - DNA, 15 bp, Homo sapiens
tgacatgcagtaggt

SEQ ID NO: 37207 - DNA, 15 bp, Homo sapiens
gacatgcagtaggtg

SEQ ID NO: 37208 - DNA, 15 bp, Homo sapiens
acatgcagtaggtgc

SEQ ID NO: 37209 - DNA, 15 bp, Homo sapiens
catgcagtaggtgct

SEQ ID NO: 37210 - DNA, 15 bp, Homo sapiens
atgcagtaggtgctg

SEQ ID NO: 37211 - DNA, 15 bp, Homo sapiens
tgcagtaggtgctga

SEQ ID NO: 37212 - DNA, 15 bp, Homo sapiens
gcagtaggtgctgag

SEQ ID NO: 37213 - DNA, 15 bp, Homo sapiens
cagtaggtgctgagg

SEQ ID NO: 37214 - DNA, 15 bp, Homo sapiens
agtaggtgctgaggg

SEQ ID NO: 37215 - DNA, 15 bp, Homo sapiens
gtaggtgctgagggg

SEQ ID NO: 37216 - DNA, 15 bp, Homo sapiens
taggtgctgaggggc

SEQ ID NO: 37217 - DNA, 15 bp, Homo sapiens
aggtgctgaggggca

SEQ ID NO: 37218 - DNA, 15 bp, Homo sapiens
ggtgctgaggggcat

SEQ ID NO: 37219 - DNA, 15 bp, Homo sapiens
gtgctgaggggcatg

SEQ ID NO: 37220 - DNA, 15 bp, Homo sapiens
tgctgaggggcatgt

SEQ ID NO: 37221 - DNA, 15 bp, Homo sapiens
gctgaggggcatgtg

SEQ ID NO: 37222 - DNA, 15 bp, Homo sapiens
ctgaggggcatgtgt

SEQ ID NO: 37223 - DNA, 15 bp, Homo sapiens
tgaggggcatgtgtt

SEQ ID NO: 37224 - DNA, 15 bp, Homo sapiens
gaggggcatgtgtta

SEQ ID NO: 37225 - DNA, 15 bp, Homo sapiens
aggggcatgtgttaa

SEQ ID NO: 37226 - DNA, 15 bp, Homo sapiens
ggggcatgtgttaag

SEQ ID NO: 37227 - DNA, 15 bp, Homo sapiens
gggcatgtgttaagg

SEQ ID NO: 37228 - DNA, 15 bp, Homo sapiens
ggcatgtgttaaggg

SEQ ID NO: 37229 - DNA, 15 bp, Homo sapiens
gcatgtgttaaggga

SEQ ID NO: 37230 - DNA, 15 bp, Homo sapiens
catgtgttaagggaa

SEQ ID NO: 37231 - DNA, 15 bp, Homo sapiens
atgtgttaagggaac

SEQ ID NO: 37232 - DNA, 15 bp, Homo sapiens
tgtgttaagggaacg

SEQ ID NO: 37233 - DNA, 15 bp, Homo sapiens
gtgttaagggaacga

SEQ ID NO: 37234 - DNA, 15 bp, Homo sapiens
tgttaagggaacgag

SEQ ID NO: 37235 - DNA, 15 bp, Homo sapiens
gttaagggaacgagg

SEQ ID NO: 37236 - DNA, 15 bp, Homo sapiens
ttaagggaacgaggg

SEQ ID NO: 37237 - DNA, 15 bp, Homo sapiens
taagggaacgagggg

SEQ ID NO: 37238 - DNA, 15 bp, Homo sapiens
aagggaacgaggggt

SEQ ID NO: 37239 - DNA, 15 bp, Homo sapiens
agggaacgaggggtg

SEQ ID NO: 37240 - DNA, 15 bp, Homo sapiens
gggaacgaggggtgt

SEQ ID NO: 37241 - DNA, 15 bp, Homo sapiens
ggaacgaggggtgtg

SEQ ID NO: 37242 - DNA, 15 bp, Homo sapiens
gaacgaggggtgtga

SEQ ID NO: 37243 - DNA, 15 bp, Homo sapiens
aacgaggggtgtgag

SEQ ID NO: 37244 - DNA, 15 bp, Homo sapiens
acgaggggtgtgaga

SEQ ID NO: 37245 - DNA, 15 bp, Homo sapiens
cgaggggtgtgagag

SEQ ID NO: 37246 - DNA, 15 bp, Homo sapiens
gaggggtgtgagagg

SEQ ID NO: 37247 - DNA, 15 bp, Homo sapiens
aggggtgtgagaggg

SEQ ID NO: 37248 - DNA, 15 bp, Homo sapiens
ggggtgtgagaggga

SEQ ID NO: 37249 - DNA, 15 bp, Homo sapiens
gggtgtgagagggag

SEQ ID NO: 37250 - DNA, 15 bp, Homo sapiens
ggtgtgagagggaga

SEQ ID NO: 37251 - DNA, 15 bp, Homo sapiens
gtgtgagagggagac

SEQ ID NO: 37252 - DNA, 15 bp, Homo sapiens
tgtgagagggagact

SEQ ID NO: 37253 - DNA, 15 bp, Homo sapiens
gtgagagggagactg

SEQ ID NO: 37254 - DNA, 15 bp, Homo sapiens
tgagagggagactga

SEQ ID NO: 37255 - DNA, 15 bp, Homo sapiens
gagagggagactgag

SEQ ID NO: 37256 - DNA, 15 bp, Homo sapiens
agagggagactgagg

SEQ ID NO: 37257 - DNA, 15 bp, Homo sapiens
gagggagactgaggt

SEQ ID NO: 37258 - DNA, 15 bp, Homo sapiens
agggagactgaggta

SEQ ID NO: 37259 - DNA, 15 bp, Homo sapiens
gggagactgaggtag

SEQ ID NO: 37260 - DNA, 15 bp, Homo sapiens
ggagactgaggtaga

SEQ ID NO: 37261 - DNA, 15 bp, Homo sapiens
gagactgaggtagag

SEQ ID NO: 37262 - DNA, 15 bp, Homo sapiens
agactgaggtagaga

SEQ ID NO: 37263 - DNA, 15 bp, Homo sapiens
gactgaggtagagag

SEQ ID NO: 37264 - DNA, 15 bp, Homo sapiens
actgaggtagagagg

SEQ ID NO: 37265 - DNA, 15 bp, Homo sapiens
ctgaggtagagaggg

SEQ ID NO: 37266 - DNA, 15 bp, Homo sapiens
tgaggtagagagggg

SEQ ID NO: 37267 - DNA, 15 bp, Homo sapiens
gaggtagagagggga

SEQ ID NO: 37268 - DNA, 15 bp, Homo sapiens
aggtagagaggggag

SEQ ID NO: 37269 - DNA, 15 bp, Homo sapiens
ggtagagaggggagg

SEQ ID NO: 37270 - DNA, 15 bp, Homo sapiens
gtagagaggggaggg

SEQ ID NO: 37271 - DNA, 15 bp, Homo sapiens
tagagaggggagggg

SEQ ID NO: 37272 - DNA, 15 bp, Homo sapiens
agagaggggagggga

SEQ ID NO: 37273 - DNA, 15 bp, Homo sapiens
gagaggggaggggag

SEQ ID NO: 37274 - DNA, 15 bp, Homo sapiens
agaggggaggggagc

SEQ ID NO: 37275 - DNA, 15 bp, Homo sapiens
gaggggaggggagct

SEQ ID NO: 37276 - DNA, 15 bp, Homo sapiens
aggggaggggagctg

SEQ ID NO: 37277 - DNA, 15 bp, Homo sapiens
ggggaggggagctgg

SEQ ID NO: 37278 - DNA, 15 bp, Homo sapiens
gggaggggagctggg

SEQ ID NO: 37279 - DNA, 15 bp, Homo sapiens
ggaggggagctgggg

SEQ ID NO: 37280 - DNA, 15 bp, Homo sapiens
gaggggagctggggc

SEQ ID NO: 37281 - DNA, 15 bp, Homo sapiens
aggggagctggggct

SEQ ID NO: 37282 - DNA, 15 bp, Homo sapiens
ggggagctggggctc

SEQ ID NO: 37283 - DNA, 15 bp, Homo sapiens
gggagctggggctca

SEQ ID NO: 37284 - DNA, 15 bp, Homo sapiens
ggagctggggctcag

SEQ ID NO: 37285 - DNA, 15 bp, Homo sapiens
gagctggggctcaga

SEQ ID NO: 37286 - DNA, 15 bp, Homo sapiens
agctggggctcagag

SEQ ID NO: 37287 - DNA, 15 bp, Homo sapiens
gctggggctcagagg

SEQ ID NO: 37288 - DNA, 15 bp, Homo sapiens
ctggggctcagagga

SEQ ID NO: 37289 - DNA, 15 bp, Homo sapiens
tggggctcagaggag

SEQ ID NO: 37290 - DNA, 15 bp, Homo sapiens
ggggctcagaggaga

SEQ ID NO: 37291 - DNA, 15 bp, Homo sapiens
gggctcagaggagag

SEQ ID NO: 37292 - DNA, 15 bp, Homo sapiens
ggctcagaggagaga

SEQ ID NO: 37293 - DNA, 15 bp, Homo sapiens
gctcagaggagagaa

SEQ ID NO: 37294 - DNA, 15 bp, Homo sapiens
ctcagaggagagaac

SEQ ID NO: 37295 - DNA, 15 bp, Homo sapiens
tcagaggagagaact

SEQ ID NO: 37296 - DNA, 15 bp, Homo sapiens
cagaggagagaactc

SEQ ID NO: 37297 - DNA, 15 bp, Homo sapiens
agaggagagaactcc

SEQ ID NO: 37298 - DNA, 15 bp, Homo sapiens
gaggagagaactccc

SEQ ID NO: 37299 - DNA, 15 bp, Homo sapiens
aggagagaactccca

SEQ ID NO: 37300 - DNA, 15 bp, Homo sapiens
ggagagaactcccag

SEQ ID NO: 37301 - DNA, 15 bp, Homo sapiens
gagagaactcccaga

SEQ ID NO: 37302 - DNA, 15 bp, Homo sapiens
agagaactcccagag

SEQ ID NO: 37303 - DNA, 15 bp, Homo sapiens
gagaactcccagagg

SEQ ID NO: 37304 - DNA, 15 bp, Homo sapiens
agaactcccagaggg

SEQ ID NO: 37305 - DNA, 15 bp, Homo sapiens
gaactcccagagggt

SEQ ID NO: 37306 - DNA, 15 bp, Homo sapiens
aactcccagagggtc

SEQ ID NO: 37307 - DNA, 15 bp, Homo sapiens
actcccagagggtct

SEQ ID NO: 37308 - DNA, 15 bp, Homo sapiens
ctcccagagggtctg

SEQ ID NO: 37309 - DNA, 15 bp, Homo sapiens
tcccagagggtctgg

SEQ ID NO: 37310 - DNA, 15 bp, Homo sapiens
cccagagggtctggg

SEQ ID NO: 37311 - DNA, 15 bp, Homo sapiens
ccagagggtctgggc

SEQ ID NO: 37312 - DNA, 15 bp, Homo sapiens
cagagggtctgggcc

SEQ ID NO: 37313 - DNA, 15 bp, Homo sapiens
agagggtctgggccc

SEQ ID NO: 37314 - DNA, 15 bp, Homo sapiens
gagggtctgggccct

SEQ ID NO: 37315 - DNA, 15 bp, Homo sapiens
agggtctgggccctc

SEQ ID NO: 37316 - DNA, 15 bp, Homo sapiens
gggtctgggccctcc

SEQ ID NO: 37317 - DNA, 15 bp, Homo sapiens
ggtctgggccctccc

SEQ ID NO: 37318 - DNA, 15 bp, Homo sapiens
gtctgggccctcccc

SEQ ID NO: 37319 - DNA, 15 bp, Homo sapiens
tctgggccctcccca

SEQ ID NO: 37320 - DNA, 15 bp, Homo sapiens
ctgggccctccccat

SEQ ID NO: 37321 - DNA, 15 bp, Homo sapiens
tgggccctccccatt

SEQ ID NO: 37322 - DNA, 15 bp, Homo sapiens
gggccctccccattc

SEQ ID NO: 37323 - DNA, 15 bp, Homo sapiens
ggccctccccattca

SEQ ID NO: 37324 - DNA, 15 bp, Homo sapiens
gccctccccattcag

SEQ ID NO: 37325 - DNA, 15 bp, Homo sapiens
ccctccccattcaga

SEQ ID NO: 37326 - DNA, 15 bp, Homo sapiens
cctccccattcagag

SEQ ID NO: 37327 - DNA, 15 bp, Homo sapiens
ctccccattcagagc

SEQ ID NO: 37328 - DNA, 15 bp, Homo sapiens
tccccattcagagca

SEQ ID NO: 37329 - DNA, 15 bp, Homo sapiens
ccccattcagagcat

SEQ ID NO: 37330 - DNA, 15 bp, Homo sapiens
cccattcagagcatt

SEQ ID NO: 37331 - DNA, 15 bp, Homo sapiens
ccattcagagcattg

SEQ ID NO: 37332 - DNA, 15 bp, Homo sapiens
cattcagagcattga

SEQ ID NO: 37333 - DNA, 15 bp, Homo sapiens
attcagagcattgag

SEQ ID NO: 37334 - DNA, 15 bp, Homo sapiens
ttcagagcattgagc

SEQ ID NO: 37335 - DNA, 15 bp, Homo sapiens
tcagagcattgagcc

SEQ ID NO: 37336 - DNA, 15 bp, Homo sapiens
cagagcattgagcca

SEQ ID NO: 37337 - DNA, 15 bp, Homo sapiens
agagcattgagccag

SEQ ID NO: 37338 - DNA, 15 bp, Homo sapiens
gagcattgagccaga

SEQ ID NO: 37339 - DNA, 15 bp, Homo sapiens
agcattgagccagac

SEQ ID NO: 37340 - DNA, 15 bp, Homo sapiens
gcattgagccagacc

SEQ ID NO: 37341 - DNA, 15 bp, Homo sapiens
cattgagccagacca

SEQ ID NO: 37342 - DNA, 15 bp, Homo sapiens
attgagccagaccag

SEQ ID NO: 37343 - DNA, 15 bp, Homo sapiens
ttgagccagaccagg

SEQ ID NO: 37344 - DNA, 15 bp, Homo sapiens
tgagccagaccaggc

SEQ ID NO: 37345 - DNA, 15 bp, Homo sapiens
gagccagaccaggcc

SEQ ID NO: 37346 - DNA, 15 bp, Homo sapiens
agccagaccaggcct

SEQ ID NO: 37347 - DNA, 15 bp, Homo sapiens
gccagaccaggcctg

SEQ ID NO: 37348 - DNA, 15 bp, Homo sapiens
ccagaccaggcctgt

SEQ ID NO: 37349 - DNA, 15 bp, Homo sapiens
cagaccaggcctgtc

SEQ ID NO: 37350 - DNA, 15 bp, Homo sapiens
agaccaggcctgtcg

SEQ ID NO: 37351 - DNA, 15 bp, Homo sapiens
gaccaggcctgtcgt

SEQ ID NO: 37352 - DNA, 15 bp, Homo sapiens
accaggcctgtcgtg

SEQ ID NO: 37353 - DNA, 15 bp, Homo sapiens
ccaggcctgtcgtgg

SEQ ID NO: 37354 - DNA, 15 bp, Homo sapiens
caggcctgtcgtggt

SEQ ID NO: 37355 - DNA, 15 bp, Homo sapiens
aggcctgtcgtggtc

SEQ ID NO: 37356 - DNA, 15 bp, Homo sapiens
ggcctgtcgtggtca

SEQ ID NO: 37357 - DNA, 15 bp, Homo sapiens
gcctgtcgtggtcac

SEQ ID NO: 37358 - DNA, 15 bp, Homo sapiens
cctgtcgtggtcacc

SEQ ID NO: 37359 - DNA, 15 bp, Homo sapiens
ctgtcgtggtcacct

SEQ ID NO: 37360 - DNA, 15 bp, Homo sapiens
tgtcgtggtcacctg

SEQ ID NO: 37361 - DNA, 15 bp, Homo sapiens
gtcgtggtcacctgc

SEQ ID NO: 37362 - DNA, 15 bp, Homo sapiens
tcgtggtcacctgca

SEQ ID NO: 37363 - DNA, 15 bp, Homo sapiens
cgtggtcacctgcat

SEQ ID NO: 37364 - DNA, 15 bp, Homo sapiens
gtggtcacctgcatg

SEQ ID NO: 37365 - DNA, 15 bp, Homo sapiens
tggtcacctgcatgg

SEQ ID NO: 37366 - DNA, 15 bp, Homo sapiens
ggtcacctgcatgga

SEQ ID NO: 37367 - DNA, 15 bp, Homo sapiens
gtcacctgcatggaa

SEQ ID NO: 37368 - DNA, 15 bp, Homo sapiens
tcacctgcatggaat

SEQ ID NO: 37369 - DNA, 15 bp, Homo sapiens
cacctgcatggaatc

SEQ ID NO: 37370 - DNA, 15 bp, Homo sapiens
acctgcatggaatct

SEQ ID NO: 37371 - DNA, 15 bp, Homo sapiens
cctgcatggaatctt

SEQ ID NO: 37372 - DNA, 15 bp, Homo sapiens
ctgcatggaatcttc

SEQ ID NO: 37373 - DNA, 15 bp, Homo sapiens
tgcatggaatcttct

SEQ ID NO: 37374 - DNA, 15 bp, Homo sapiens
gcatggaatcttctc

SEQ ID NO: 37375 - DNA, 15 bp, Homo sapiens
catggaatcttctcc

SEQ ID NO: 37376 - DNA, 15 bp, Homo sapiens
atggaatcttctccc

SEQ ID NO: 37377 - DNA, 15 bp, Homo sapiens
tggaatcttctccct

SEQ ID NO: 37378 - DNA, 15 bp, Homo sapiens
ggaatcttctcccta

SEQ ID NO: 37379 - DNA, 15 bp, Homo sapiens
gaatcttctccctac

SEQ ID NO: 37380 - DNA, 15 bp, Homo sapiens
aatcttctccctact

SEQ ID NO: 37381 - DNA, 15 bp, Homo sapiens
atcttctccctactt

SEQ ID NO: 37382 - DNA, 15 bp, Homo sapiens
tcttctccctactta

SEQ ID NO: 37383 - DNA, 15 bp, Homo sapiens
cttctccctacttag

SEQ ID NO: 37384 - DNA, 15 bp, Homo sapiens
ttctccctacttagg

SEQ ID NO: 37385 - DNA, 15 bp, Homo sapiens
tctccctacttaggc

SEQ ID NO: 37386 - DNA, 15 bp, Homo sapiens
ctccctacttaggca

SEQ ID NO: 37387 - DNA, 15 bp, Homo sapiens
tccctacttaggcac

SEQ ID NO: 37388 - DNA, 15 bp, Homo sapiens
ccctacttaggcact

SEQ ID NO: 37389 - DNA, 15 bp, Homo sapiens
cctacttaggcactg

SEQ ID NO: 37390 - DNA, 15 bp, Homo sapiens
ctacttaggcactgc

SEQ ID NO: 37391 - DNA, 15 bp, Homo sapiens
tacttaggcactgcc

SEQ ID NO: 37392 - DNA, 15 bp, Homo sapiens
acttaggcactgcca

SEQ ID NO: 37393 - DNA, 15 bp, Homo sapiens
cttaggcactgccag

SEQ ID NO: 37394 - DNA, 15 bp, Homo sapiens
ttaggcactgccagg

SEQ ID NO: 37395 - DNA, 15 bp, Homo sapiens
taggcactgccaggc

SEQ ID NO: 37396 - DNA, 15 bp, Homo sapiens
aggcactgccaggcg

SEQ ID NO: 37397 - DNA, 15 bp, Homo sapiens
ggcactgccaggcgg

SEQ ID NO: 37398 - DNA, 15 bp, Homo sapiens
gcactgccaggcgga

SEQ ID NO: 37399 - DNA, 15 bp, Homo sapiens
cactgccaggcggac

SEQ ID NO: 37400 - DNA, 15 bp, Homo sapiens
actgccaggcggacc

SEQ ID NO: 37401 - DNA, 15 bp, Homo sapiens
ctgccaggcggacca

SEQ ID NO: 37402 - DNA, 15 bp, Homo sapiens
tgccaggcggaccat

SEQ ID NO: 37403 - DNA, 15 bp, Homo sapiens
gccaggcggaccatc

SEQ ID NO: 37404 - DNA, 15 bp, Homo sapiens
ccaggcggaccatct

SEQ ID NO: 37405 - DNA, 15 bp, Homo sapiens
caggcggaccatctt

SEQ ID NO: 37406 - DNA, 15 bp, Homo sapiens
aggcggaccatcttc

SEQ ID NO: 37407 - DNA, 15 bp, Homo sapiens
ggcggaccatcttct

SEQ ID NO: 37408 - DNA, 15 bp, Homo sapiens
gcggaccatcttctg

SEQ ID NO: 37409 - DNA, 15 bp, Homo sapiens
cggaccatcttctgg

SEQ ID NO: 37410 - DNA, 15 bp, Homo sapiens
ggaccatcttctgga

SEQ ID NO: 37411 - DNA, 15 bp, Homo sapiens
gaccatcttctggat

SEQ ID NO: 37412 - DNA, 15 bp, Homo sapiens
accatcttctggatg

SEQ ID NO: 37413 - DNA, 15 bp, Homo sapiens
ccatcttctggatga

SEQ ID NO: 37414 - DNA, 15 bp, Homo sapiens
catcttctggatgag

SEQ ID NO: 37415 - DNA, 15 bp, Homo sapiens
atcttctggatgaga

SEQ ID NO: 37416 - DNA, 15 bp, Homo sapiens
tcttctggatgagaa

SEQ ID NO: 37417 - DNA, 15 bp, Homo sapiens
cttctggatgagaag

SEQ ID NO: 37418 - DNA, 15 bp, Homo sapiens
ttctggatgagaagg

SEQ ID NO: 37419 - DNA, 15 bp, Homo sapiens
tctggatgagaaggg

SEQ ID NO: 37420 - DNA, 15 bp, Homo sapiens
ctggatgagaagggc

SEQ ID NO: 37421 - DNA, 15 bp, Homo sapiens
tggatgagaagggca

SEQ ID NO: 37422 - DNA, 15 bp, Homo sapiens
ggatgagaagggcag

SEQ ID NO: 37423 - DNA, 15 bp, Homo sapiens
gatgagaagggcagg

SEQ ID NO: 37424 - DNA, 15 bp, Homo sapiens
atgagaagggcaggg

SEQ ID NO: 37425 - DNA, 15 bp, Homo sapiens
tgagaagggcagggc

SEQ ID NO: 37426 - DNA, 15 bp, Homo sapiens
gagaagggcagggca

SEQ ID NO: 37427 - DNA, 15 bp, Homo sapiens
agaagggcagggcac

SEQ ID NO: 37428 - DNA, 15 bp, Homo sapiens
gaagggcagggcaca

SEQ ID NO: 37429 - DNA, 15 bp, Homo sapiens
aagggcagggcacaa

SEQ ID NO: 37430 - DNA, 15 bp, Homo sapiens
agggcagggcacaat

SEQ ID NO: 37431 - DNA, 15 bp, Homo sapiens
gggcagggcacaatg

SEQ ID NO: 37432 - DNA, 15 bp, Homo sapiens
ggcagggcacaatgt

SEQ ID NO: 37433 - DNA, 15 bp, Homo sapiens
gcagggcacaatgtc

SEQ ID NO: 37434 - DNA, 15 bp, Homo sapiens
cagggcacaatgtct

SEQ ID NO: 37435 - DNA, 15 bp, Homo sapiens
agggcacaatgtctc

SEQ ID NO: 37436 - DNA, 15 bp, Homo sapiens
gggcacaatgtctcc

SEQ ID NO: 37437 - DNA, 15 bp, Homo sapiens
ggcacaatgtctcct

SEQ ID NO: 37438 - DNA, 15 bp, Homo sapiens
gcacaatgtctcctc

SEQ ID NO: 37439 - DNA, 15 bp, Homo sapiens
cacaatgtctcctcc

SEQ ID NO: 37440 - DNA, 15 bp, Homo sapiens
acaatgtctcctcca

SEQ ID NO: 37441 - DNA, 15 bp, Homo sapiens
caatgtctcctccag

SEQ ID NO: 37442 - DNA, 15 bp, Homo sapiens
aatgtctcctccaga

SEQ ID NO: 37443 - DNA, 15 bp, Homo sapiens
atgtctcctccagag

SEQ ID NO: 37444 - DNA, 15 bp, Homo sapiens
tgtctcctccagaga

SEQ ID NO: 37445 - DNA, 15 bp, Homo sapiens
gtctcctccagagag

SEQ ID NO: 37446 - DNA, 15 bp, Homo sapiens
tctcctccagagaga

SEQ ID NO: 37447 - DNA, 15 bp, Homo sapiens
ctcctccagagagag

SEQ ID NO: 37448 - DNA, 15 bp, Homo sapiens
tcctccagagagaga

SEQ ID NO: 37449 - DNA, 15 bp, Homo sapiens
cctccagagagagat

SEQ ID NO: 37450 - DNA, 15 bp, Homo sapiens
ctccagagagagatg

SEQ ID NO: 37451 - DNA, 15 bp, Homo sapiens
tccagagagagatgg

SEQ ID NO: 37452 - DNA, 15 bp, Homo sapiens
ccagagagagatggt

SEQ ID NO: 37453 - DNA, 15 bp, Homo sapiens
cagagagagatggta

SEQ ID NO: 37454 - DNA, 15 bp, Homo sapiens
agagagagatggtac

SEQ ID NO: 37455 - DNA, 15 bp, Homo sapiens
gagagagatggtaca

SEQ ID NO: 37456 - DNA, 15 bp, Homo sapiens
agagagatggtacag

SEQ ID NO: 37457 - DNA, 15 bp, Homo sapiens
gagagatggtacagt

SEQ ID NO: 37458 - DNA, 15 bp, Homo sapiens
agagatggtacagtc

SEQ ID NO: 37459 - DNA, 15 bp, Homo sapiens
gagatggtacagtct

SEQ ID NO: 37460 - DNA, 15 bp, Homo sapiens
agatggtacagtctc

SEQ ID NO: 37461 - DNA, 15 bp, Homo sapiens
gatggtacagtctct

SEQ ID NO: 37462 - DNA, 15 bp, Homo sapiens
atggtacagtctctg

SEQ ID NO: 37463 - DNA, 15 bp, Homo sapiens
tggtacagtctctgg

SEQ ID NO: 37464 - DNA, 15 bp, Homo sapiens
ggtacagtctctgga

SEQ ID NO: 37465 - DNA, 15 bp, Homo sapiens
gtacagtctctggag

SEQ ID NO: 37466 - DNA, 15 bp, Homo sapiens
tacagtctctggagc

SEQ ID NO: 37467 - DNA, 15 bp, Homo sapiens
acagtctctggagca

SEQ ID NO: 37468 - DNA, 15 bp, Homo sapiens
cagtctctggagcag

SEQ ID NO: 37469 - DNA, 15 bp, Homo sapiens
agtctctggagcagc

SEQ ID NO: 37470 - DNA, 15 bp, Homo sapiens
gtctctggagcagca

SEQ ID NO: 37471 - DNA, 15 bp, Homo sapiens
tctctggagcagcag

SEQ ID NO: 37472 - DNA, 15 bp, Homo sapiens
ctctggagcagcagg

SEQ ID NO: 37473 - DNA, 15 bp, Homo sapiens
tctggagcagcaggt

SEQ ID NO: 37474 - DNA, 15 bp, Homo sapiens
ctggagcagcaggta

SEQ ID NO: 37475 - DNA, 15 bp, Homo sapiens
tggagcagcaggtaa

SEQ ID NO: 37476 - DNA, 15 bp, Homo sapiens
ggagcagcaggtaat

SEQ ID NO: 37477 - DNA, 15 bp, Homo sapiens
gagcagcaggtaatg

SEQ ID NO: 37478 - DNA, 15 bp, Homo sapiens
agcagcaggtaatgc

SEQ ID NO: 37479 - DNA, 15 bp, Homo sapiens
gcagcaggtaatgcc

SEQ ID NO: 37480 - DNA, 15 bp, Homo sapiens
cagcaggtaatgcca

SEQ ID NO: 37481 - DNA, 15 bp, Homo sapiens
agcaggtaatgccag

SEQ ID NO: 37482 - DNA, 15 bp, Homo sapiens
gcaggtaatgccagg

SEQ ID NO: 37483 - DNA, 15 bp, Homo sapiens
caggtaatgccaggg

SEQ ID NO: 37484 - DNA, 15 bp, Homo sapiens
aggtaatgccagggc

SEQ ID NO: 37485 - DNA, 15 bp, Homo sapiens
ggtaatgccagggcg

SEQ ID NO: 37486 - DNA, 15 bp, Homo sapiens
gtaatgccagggcgg

SEQ ID NO: 37487 - DNA, 15 bp, Homo sapiens
taatgccagggcggt

SEQ ID NO: 37488 - DNA, 15 bp, Homo sapiens
aatgccagggcggtg

SEQ ID NO: 37489 - DNA, 15 bp, Homo sapiens
atgccagggcggtgg

SEQ ID NO: 37490 - DNA, 15 bp, Homo sapiens
tgccagggcggtgga

SEQ ID NO: 37491 - DNA, 15 bp, Homo sapiens
gccagggcggtggag

SEQ ID NO: 37492 - DNA, 15 bp, Homo sapiens
ccagggcggtggagg

SEQ ID NO: 37493 - DNA, 15 bp, Homo sapiens
cagggcggtggaggg

SEQ ID NO: 37494 - DNA, 15 bp, Homo sapiens
agggcggtggagggt

SEQ ID NO: 37495 - DNA, 15 bp, Homo sapiens
gggcggtggagggta

SEQ ID NO: 37496 - DNA, 15 bp, Homo sapiens
ggcggtggagggtaa

SEQ ID NO: 37497 - DNA, 15 bp, Homo sapiens
gcggtggagggtaag

SEQ ID NO: 37498 - DNA, 15 bp, Homo sapiens
cggtggagggtaagg

SEQ ID NO: 37499 - DNA, 15 bp, Homo sapiens
ggtggagggtaaggg

SEQ ID NO: 37500 - DNA, 15 bp, Homo sapiens
gtggagggtaaggga

SEQ ID NO: 37501 - DNA, 15 bp, Homo sapiens
tggagggtaagggat

SEQ ID NO: 37502 - DNA, 15 bp, Homo sapiens
ggagggtaagggata

SEQ ID NO: 37503 - DNA, 15 bp, Homo sapiens
gagggtaagggatag

SEQ ID NO: 37504 - DNA, 15 bp, Homo sapiens
agggtaagggatagg

SEQ ID NO: 37505 - DNA, 15 bp, Homo sapiens
gggtaagggataggg

SEQ ID NO: 37506 - DNA, 15 bp, Homo sapiens
ggtaagggataggga

SEQ ID NO: 37507 - DNA, 15 bp, Homo sapiens
gtaagggatagggat

SEQ ID NO: 37508 - DNA, 15 bp, Homo sapiens
taagggatagggata

SEQ ID NO: 37509 - DNA, 15 bp, Homo sapiens
aagggatagggatag

SEQ ID NO: 37510 - DNA, 15 bp, Homo sapiens
agggatagggatagt

SEQ ID NO: 37511 - DNA, 15 bp, Homo sapiens
gggatagggatagtg

SEQ ID NO: 37512 - DNA, 15 bp, Homo sapiens
ggatagggatagtgc

SEQ ID NO: 37513 - DNA, 15 bp, Homo sapiens
gatagggatagtgcg

SEQ ID NO: 37514 - DNA, 15 bp, Homo sapiens
atagggatagtgcgc

SEQ ID NO: 37515 - DNA, 15 bp, Homo sapiens
tagggatagtgcgca

SEQ ID NO: 37516 - DNA, 15 bp, Homo sapiens
agggatagtgcgcaa

SEQ ID NO: 37517 - DNA, 15 bp, Homo sapiens
gggatagtgcgcaaa

SEQ ID NO: 37518 - DNA, 15 bp, Homo sapiens
ggatagtgcgcaaaa

SEQ ID NO: 37519 - DNA, 15 bp, Homo sapiens
gatagtgcgcaaaac

SEQ ID NO: 37520 - DNA, 15 bp, Homo sapiens
atagtgcgcaaaacc

SEQ ID NO: 37521 - DNA, 15 bp, Homo sapiens
tagtgcgcaaaacct

SEQ ID NO: 37522 - DNA, 15 bp, Homo sapiens
agtgcgcaaaacctt

SEQ ID NO: 37523 - DNA, 15 bp, Homo sapiens
gtgcgcaaaaccttc

SEQ ID NO: 37524 - DNA, 15 bp, Homo sapiens
tgcgcaaaaccttct

SEQ ID NO: 37525 - DNA, 15 bp, Homo sapiens
gcgcaaaaccttctg

SEQ ID NO: 37526 - DNA, 15 bp, Homo sapiens
cgcaaaaccttctgt

SEQ ID NO: 37527 - DNA, 15 bp, Homo sapiens
gcaaaaccttctgtc

SEQ ID NO: 37528 - DNA, 15 bp, Homo sapiens
caaaaccttctgtcc

SEQ ID NO: 37529 - DNA, 15 bp, Homo sapiens
aaaaccttctgtcca

SEQ ID NO: 37530 - DNA, 15 bp, Homo sapiens
aaaccttctgtccac

SEQ ID NO: 37531 - DNA, 15 bp, Homo sapiens
aaccttctgtccacc

SEQ ID NO: 37532 - DNA, 15 bp, Homo sapiens
accttctgtccacca

SEQ ID NO: 37533 - DNA, 15 bp, Homo sapiens
ccttctgtccaccat

SEQ ID NO: 37534 - DNA, 15 bp, Homo sapiens
cttctgtccaccatg

SEQ ID NO: 37535 - DNA, 15 bp, Homo sapiens
ttctgtccaccatgt

SEQ ID NO: 37536 - DNA, 15 bp, Homo sapiens
tctgtccaccatgtg

SEQ ID NO: 37537 - DNA, 15 bp, Homo sapiens
ctgtccaccatgtgc

SEQ ID NO: 37538 - DNA, 15 bp, Homo sapiens
tgtccaccatgtgcc

SEQ ID NO: 37539 - DNA, 15 bp, Homo sapiens
gtccaccatgtgcca

SEQ ID NO: 37540 - DNA, 15 bp, Homo sapiens
tccaccatgtgccag

SEQ ID NO: 37541 - DNA, 15 bp, Homo sapiens
ccaccatgtgccaga

SEQ ID NO: 37542 - DNA, 15 bp, Homo sapiens
caccatgtgccagaa

SEQ ID NO: 37543 - DNA, 15 bp, Homo sapiens
accatgtgccagaaa

SEQ ID NO: 37544 - DNA, 15 bp, Homo sapiens
ccatgtgccagaaac

SEQ ID NO: 37545 - DNA, 15 bp, Homo sapiens
catgtgccagaaacc

SEQ ID NO: 37546 - DNA, 15 bp, Homo sapiens
atgtgccagaaacca

SEQ ID NO: 37547 - DNA, 15 bp, Homo sapiens
tgtgccagaaaccaa

SEQ ID NO: 37548 - DNA, 15 bp, Homo sapiens
gtgccagaaaccaag

SEQ ID NO: 37549 - DNA, 15 bp, Homo sapiens
tgccagaaaccaagt

SEQ ID NO: 37550 - DNA, 15 bp, Homo sapiens
gccagaaaccaagtt

SEQ ID NO: 37551 - DNA, 15 bp, Homo sapiens
ccagaaaccaagttc

SEQ ID NO: 37552 - DNA, 15 bp, Homo sapiens
cagaaaccaagttca

SEQ ID NO: 37553 - DNA, 15 bp, Homo sapiens
agaaaccaagttcac

SEQ ID NO: 37554 - DNA, 15 bp, Homo sapiens
gaaaccaagttcacc

SEQ ID NO: 37555 - DNA, 15 bp, Homo sapiens
aaaccaagttcacct

SEQ ID NO: 37556 - DNA, 15 bp, Homo sapiens
aaccaagttcacctg

SEQ ID NO: 37557 - DNA, 15 bp, Homo sapiens
accaagttcacctgg

SEQ ID NO: 37558 - DNA, 15 bp, Homo sapiens
ccaagttcacctggg

SEQ ID NO: 37559 - DNA, 15 bp, Homo sapiens
caagttcacctggga

SEQ ID NO: 37560 - DNA, 15 bp, Homo sapiens
aagttcacctgggac

SEQ ID NO: 37561 - DNA, 15 bp, Homo sapiens
agttcacctgggacg

SEQ ID NO: 37562 - DNA, 15 bp, Homo sapiens
gttcacctgggacga

SEQ ID NO: 37563 - DNA, 15 bp, Homo sapiens
ttcacctgggacgag

SEQ ID NO: 37564 - DNA, 15 bp, Homo sapiens
tcacctgggacgagg

SEQ ID NO: 37565 - DNA, 15 bp, Homo sapiens
cacctgggacgaggg

SEQ ID NO: 37566 - DNA, 15 bp, Homo sapiens
acctgggacgagggc

SEQ ID NO: 37567 - DNA, 15 bp, Homo sapiens
cctgggacgagggct

SEQ ID NO: 37568 - DNA, 15 bp, Homo sapiens
ctgggacgagggctg

SEQ ID NO: 37569 - DNA, 15 bp, Homo sapiens
tgggacgagggctgg

SEQ ID NO: 37570 - DNA, 15 bp, Homo sapiens
gggacgagggctggt

SEQ ID NO: 37571 - DNA, 15 bp, Homo sapiens
ggacgagggctggta

SEQ ID NO: 37572 - DNA, 15 bp, Homo sapiens
gacgagggctggtat

SEQ ID NO: 37573 - DNA, 15 bp, Homo sapiens
acgagggctggtata

SEQ ID NO: 37574 - DNA, 15 bp, Homo sapiens
cgagggctggtataa

SEQ ID NO: 37575 - DNA, 15 bp, Homo sapiens
gagggctggtataaa

SEQ ID NO: 37576 - DNA, 15 bp, Homo sapiens
agggctggtataaag

SEQ ID NO: 37577 - DNA, 15 bp, Homo sapiens
gggctggtataaagg

SEQ ID NO: 37578 - DNA, 15 bp, Homo sapiens
ggctggtataaagga

SEQ ID NO: 37579 - DNA, 15 bp, Homo sapiens
gctggtataaaggaa

SEQ ID NO: 37580 - DNA, 15 bp, Homo sapiens
ctggtataaaggaag

SEQ ID NO: 37581 - DNA, 15 bp, Homo sapiens
tggtataaaggaagg

SEQ ID NO: 37582 - DNA, 15 bp, Homo sapiens
ggtataaaggaagga

SEQ ID NO: 37583 - DNA, 15 bp, Homo sapiens
gtataaaggaaggaa

SEQ ID NO: 37584 - DNA, 15 bp, Homo sapiens
tataaaggaaggaag

SEQ ID NO: 37585 - DNA, 15 bp, Homo sapiens
ataaaggaaggaaga

SEQ ID NO: 37586 - DNA, 15 bp, Homo sapiens
taaaggaaggaagag

SEQ ID NO: 37587 - DNA, 15 bp, Homo sapiens
aaaggaaggaagagg

SEQ ID NO: 37588 - DNA, 15 bp, Homo sapiens
aaggaaggaagagga

SEQ ID NO: 37589 - DNA, 15 bp, Homo sapiens
aggaaggaagaggag

SEQ ID NO: 37590 - DNA, 15 bp, Homo sapiens
ggaaggaagaggagc

SEQ ID NO: 37591 - DNA, 15 bp, Homo sapiens
gaaggaagaggagcg

SEQ ID NO: 37592 - DNA, 15 bp, Homo sapiens
aaggaagaggagcgg

SEQ ID NO: 37593 - DNA, 15 bp, Homo sapiens
aggaagaggagcggg

SEQ ID NO: 37594 - DNA, 15 bp, Homo sapiens
ggaagaggagcgggc

SEQ ID NO: 37595 - DNA, 15 bp, Homo sapiens
gaagaggagcgggca

SEQ ID NO: 37596 - DNA, 15 bp, Homo sapiens
aagaggagcgggcac

SEQ ID NO: 37597 - DNA, 15 bp, Homo sapiens
agaggagcgggcact

SEQ ID NO: 37598 - DNA, 15 bp, Homo sapiens
gaggagcgggcactc

SEQ ID NO: 37599 - DNA, 15 bp, Homo sapiens
aggagcgggcactcc

SEQ ID NO: 37600 - DNA, 15 bp, Homo sapiens
ggagcgggcactccc

SEQ ID NO: 37601 - DNA, 15 bp, Homo sapiens
gagcgggcactccca

SEQ ID NO: 37602 - DNA, 15 bp, Homo sapiens
agcgggcactcccag

SEQ ID NO: 37603 - DNA, 15 bp, Homo sapiens
gcgggcactcccagg

SEQ ID NO: 37604 - DNA, 15 bp, Homo sapiens
cgggcactcccaggg

SEQ ID NO: 37605 - DNA, 15 bp, Homo sapiens
gggcactcccaggga

SEQ ID NO: 37606 - DNA, 15 bp, Homo sapiens
ggcactcccagggaa

SEQ ID NO: 37607 - DNA, 15 bp, Homo sapiens
gcactcccagggaag

SEQ ID NO: 37608 - DNA, 15 bp, Homo sapiens
cactcccagggaaga

SEQ ID NO: 37609 - DNA, 15 bp, Homo sapiens
actcccagggaagac

SEQ ID NO: 37610 - DNA, 15 bp, Homo sapiens
ctcccagggaagacc

SEQ ID NO: 37611 - DNA, 15 bp, Homo sapiens
tcccagggaagaccg

SEQ ID NO: 37612 - DNA, 15 bp, Homo sapiens
cccagggaagaccgt

SEQ ID NO: 37613 - DNA, 15 bp, Homo sapiens
ccagggaagaccgta

SEQ ID NO: 37614 - DNA, 15 bp, Homo sapiens
cagggaagaccgtag

SEQ ID NO: 37615 - DNA, 15 bp, Homo sapiens
agggaagaccgtagc

SEQ ID NO: 37616 - DNA, 15 bp, Homo sapiens
gggaagaccgtagcc

SEQ ID NO: 37617 - DNA, 15 bp, Homo sapiens
ggaagaccgtagcct

SEQ ID NO: 37618 - DNA, 15 bp, Homo sapiens
gaagaccgtagcctg

SEQ ID NO: 37619 - DNA, 15 bp, Homo sapiens
aagaccgtagcctgg

SEQ ID NO: 37620 - DNA, 15 bp, Homo sapiens
agaccgtagcctggg

SEQ ID NO: 37621 - DNA, 15 bp, Homo sapiens
gaccgtagcctgggc

SEQ ID NO: 37622 - DNA, 15 bp, Homo sapiens
accgtagcctgggca

SEQ ID NO: 37623 - DNA, 15 bp, Homo sapiens
ccgtagcctgggcaa

SEQ ID NO: 37624 - DNA, 15 bp, Homo sapiens
cgtagcctgggcaaa

SEQ ID NO: 37625 - DNA, 15 bp, Homo sapiens
gtagcctgggcaaag

SEQ ID NO: 37626 - DNA, 15 bp, Homo sapiens
tagcctgggcaaaga

SEQ ID NO: 37627 - DNA, 15 bp, Homo sapiens
agcctgggcaaagat

SEQ ID NO: 37628 - DNA, 15 bp, Homo sapiens
gcctgggcaaagatg

SEQ ID NO: 37629 - DNA, 15 bp, Homo sapiens
cctgggcaaagatgt

SEQ ID NO: 37630 - DNA, 15 bp, Homo sapiens
ctgggcaaagatgtg

SEQ ID NO: 37631 - DNA, 15 bp, Homo sapiens
tgggcaaagatgtgg

SEQ ID NO: 37632 - DNA, 15 bp, Homo sapiens
gggcaaagatgtggc

SEQ ID NO: 37633 - DNA, 15 bp, Homo sapiens
ggcaaagatgtggca

SEQ ID NO: 37634 - DNA, 15 bp, Homo sapiens
gcaaagatgtggcag

SEQ ID NO: 37635 - DNA, 15 bp, Homo sapiens
caaagatgtggcaga

SEQ ID NO: 37636 - DNA, 15 bp, Homo sapiens
aaagatgtggcagag

SEQ ID NO: 37637 - DNA, 15 bp, Homo sapiens
aagatgtggcagaga

SEQ ID NO: 37638 - DNA, 15 bp, Homo sapiens
agatgtggcagagaa

SEQ ID NO: 37639 - DNA, 15 bp, Homo sapiens
gatgtggcagagaag

SEQ ID NO: 37640 - DNA, 15 bp, Homo sapiens
atgtggcagagaagg

SEQ ID NO: 37641 - DNA, 15 bp, Homo sapiens
tgtggcagagaaggg

SEQ ID NO: 37642 - DNA, 15 bp, Homo sapiens
gtggcagagaagggc

SEQ ID NO: 37643 - DNA, 15 bp, Homo sapiens
tggcagagaagggcc

SEQ ID NO: 37644 - DNA, 15 bp, Homo sapiens
ggcagagaagggcca

SEQ ID NO: 37645 - DNA, 15 bp, Homo sapiens
gcagagaagggccag

SEQ ID NO: 37646 - DNA, 15 bp, Homo sapiens
cagagaagggccagg

SEQ ID NO: 37647 - DNA, 15 bp, Homo sapiens
agagaagggccaggc

SEQ ID NO: 37648 - DNA, 15 bp, Homo sapiens
gagaagggccaggct

SEQ ID NO: 37649 - DNA, 15 bp, Homo sapiens
agaagggccaggctg

SEQ ID NO: 37650 - DNA, 15 bp, Homo sapiens
gaagggccaggctga

SEQ ID NO: 37651 - DNA, 15 bp, Homo sapiens
aagggccaggctgag

SEQ ID NO: 37652 - DNA, 15 bp, Homo sapiens
agggccaggctgagg

SEQ ID NO: 37653 - DNA, 15 bp, Homo sapiens
gggccaggctgaggc

SEQ ID NO: 37654 - DNA, 15 bp, Homo sapiens
ggccaggctgaggcc

SEQ ID NO: 37655 - DNA, 15 bp, Homo sapiens
gccaggctgaggcct

SEQ ID NO: 37656 - DNA, 15 bp, Homo sapiens
ccaggctgaggcctc

SEQ ID NO: 37657 - DNA, 15 bp, Homo sapiens
caggctgaggcctca

SEQ ID NO: 37658 - DNA, 15 bp, Homo sapiens
aggctgaggcctcat

SEQ ID NO: 37659 - DNA, 15 bp, Homo sapiens
ggctgaggcctcatg

SEQ ID NO: 37660 - DNA, 15 bp, Homo sapiens
gctgaggcctcatgt

SEQ ID NO: 37661 - DNA, 15 bp, Homo sapiens
ctgaggcctcatgtt

SEQ ID NO: 37662 - DNA, 15 bp, Homo sapiens
tgaggcctcatgttt

SEQ ID NO: 37663 - DNA, 15 bp, Homo sapiens
gaggcctcatgtttg

SEQ ID NO: 37664 - DNA, 15 bp, Homo sapiens
aggcctcatgtttgt

SEQ ID NO: 37665 - DNA, 15 bp, Homo sapiens
ggcctcatgtttgtg

SEQ ID NO: 37666 - DNA, 15 bp, Homo sapiens
gcctcatgtttgtgc

SEQ ID NO: 37667 - DNA, 15 bp, Homo sapiens
cctcatgtttgtgcc

SEQ ID NO: 37668 - DNA, 15 bp, Homo sapiens
ctcatgtttgtgcca

SEQ ID NO: 37669 - DNA, 15 bp, Homo sapiens
tcatgtttgtgccat

SEQ ID NO: 37670 - DNA, 15 bp, Homo sapiens
catgtttgtgccatt

SEQ ID NO: 37671 - DNA, 15 bp, Homo sapiens
atgtttgtgccattt

SEQ ID NO: 37672 - DNA, 15 bp, Homo sapiens
tgtttgtgccatttc

SEQ ID NO: 37673 - DNA, 15 bp, Homo sapiens
gtttgtgccatttca

SEQ ID NO: 37674 - DNA, 15 bp, Homo sapiens
tttgtgccatttcac

SEQ ID NO: 37675 - DNA, 15 bp, Homo sapiens
ttgtgccatttcaca

SEQ ID NO: 37676 - DNA, 15 bp, Homo sapiens
tgtgccatttcacag

SEQ ID NO: 37677 - DNA, 15 bp, Homo sapiens
gtgccatttcacagc

SEQ ID NO: 37678 - DNA, 15 bp, Homo sapiens
tgccatttcacagct

SEQ ID NO: 37679 - DNA, 15 bp, Homo sapiens
gccatttcacagctg

SEQ ID NO: 37680 - DNA, 15 bp, Homo sapiens
ccatttcacagctgg

SEQ ID NO: 37681 - DNA, 15 bp, Homo sapiens
catttcacagctggt

SEQ ID NO: 37682 - DNA, 15 bp, Homo sapiens
atttcacagctggtg

SEQ ID NO: 37683 - DNA, 15 bp, Homo sapiens
tttcacagctggtgc

SEQ ID NO: 37684 - DNA, 15 bp, Homo sapiens
ttcacagctggtgct

SEQ ID NO: 37685 - DNA, 15 bp, Homo sapiens
tcacagctggtgctg

SEQ ID NO: 37686 - DNA, 15 bp, Homo sapiens
cacagctggtgctgg

SEQ ID NO: 37687 - DNA, 15 bp, Homo sapiens
acagctggtgctgga

SEQ ID NO: 37688 - DNA, 15 bp, Homo sapiens
cagctggtgctggag

SEQ ID NO: 37689 - DNA, 15 bp, Homo sapiens
agctggtgctggaga

SEQ ID NO: 37690 - DNA, 15 bp, Homo sapiens
gctggtgctggagaa

SEQ ID NO: 37691 - DNA, 15 bp, Homo sapiens
ctggtgctggagaag

SEQ ID NO: 37692 - DNA, 15 bp, Homo sapiens
tggtgctggagaagg

SEQ ID NO: 37693 - DNA, 15 bp, Homo sapiens
ggtgctggagaagga

SEQ ID NO: 37694 - DNA, 15 bp, Homo sapiens
gtgctggagaaggag

SEQ ID NO: 37695 - DNA, 15 bp, Homo sapiens
tgctggagaaggaga

SEQ ID NO: 37696 - DNA, 15 bp, Homo sapiens
gctggagaaggagaa

SEQ ID NO: 37697 - DNA, 15 bp, Homo sapiens
ctggagaaggagaag

SEQ ID NO: 37698 - DNA, 15 bp, Homo sapiens
tggagaaggagaagc

SEQ ID NO: 37699 - DNA, 15 bp, Homo sapiens
ggagaaggagaagct

SEQ ID NO: 37700 - DNA, 15 bp, Homo sapiens
gagaaggagaagctg

SEQ ID NO: 37701 - DNA, 15 bp, Homo sapiens
agaaggagaagctga

SEQ ID NO: 37702 - DNA, 15 bp, Homo sapiens
gaaggagaagctgag

SEQ ID NO: 37703 - DNA, 15 bp, Homo sapiens
aaggagaagctgagt

SEQ ID NO: 37704 - DNA, 15 bp, Homo sapiens
aggagaagctgagtg

SEQ ID NO: 37705 - DNA, 15 bp, Homo sapiens
ggagaagctgagtgc

SEQ ID NO: 37706 - DNA, 15 bp, Homo sapiens
gagaagctgagtgcc

SEQ ID NO: 37707 - DNA, 15 bp, Homo sapiens
agaagctgagtgcca

SEQ ID NO: 37708 - DNA, 15 bp, Homo sapiens
gaagctgagtgccat

SEQ ID NO: 37709 - DNA, 15 bp, Homo sapiens
aagctgagtgccatg

SEQ ID NO: 37710 - DNA, 15 bp, Homo sapiens
agctgagtgccatgc

SEQ ID NO: 37711 - DNA, 15 bp, Homo sapiens
gctgagtgccatgca

SEQ ID NO: 37712 - DNA, 15 bp, Homo sapiens
ctgagtgccatgcag

SEQ ID NO: 37713 - DNA, 15 bp, Homo sapiens
tgagtgccatgcagg

SEQ ID NO: 37714 - DNA, 15 bp, Homo sapiens
gagtgccatgcaggc

SEQ ID NO: 37715 - DNA, 15 bp, Homo sapiens
agtgccatgcaggcc

SEQ ID NO: 37716 - DNA, 15 bp, Homo sapiens
gtgccatgcaggccc

SEQ ID NO: 37717 - DNA, 15 bp, Homo sapiens
tgccatgcaggccca

SEQ ID NO: 37718 - DNA, 15 bp, Homo sapiens
gccatgcaggcccac

SEQ ID NO: 37719 - DNA, 15 bp, Homo sapiens
ccatgcaggcccacc

SEQ ID NO: 37720 - DNA, 15 bp, Homo sapiens
catgcaggcccacct

SEQ ID NO: 37721 - DNA, 15 bp, Homo sapiens
atgcaggcccacctg

SEQ ID NO: 37722 - DNA, 15 bp, Homo sapiens
tgcaggcccacctgg

SEQ ID NO: 37723 - DNA, 15 bp, Homo sapiens
gcaggcccacctggc

SEQ ID NO: 37724 - DNA, 15 bp, Homo sapiens
caggcccacctggct

SEQ ID NO: 37725 - DNA, 15 bp, Homo sapiens
aggcccacctggctg

SEQ ID NO: 37726 - DNA, 15 bp, Homo sapiens
ggcccacctggctgg

SEQ ID NO: 37727 - DNA, 15 bp, Homo sapiens
gcccacctggctggg

SEQ ID NO: 37728 - DNA, 15 bp, Homo sapiens
cccacctggctggga

SEQ ID NO: 37729 - DNA, 15 bp, Homo sapiens
ccacctggctgggaa

SEQ ID NO: 37730 - DNA, 15 bp, Homo sapiens
cacctggctgggaaa

SEQ ID NO: 37731 - DNA, 15 bp, Homo sapiens
acctggctgggaaaa

SEQ ID NO: 37732 - DNA, 15 bp, Homo sapiens
cctggctgggaaaat

SEQ ID NO: 37733 - DNA, 15 bp, Homo sapiens
ctggctgggaaaatg

SEQ ID NO: 37734 - DNA, 15 bp, Homo sapiens
tggctgggaaaatgg

SEQ ID NO: 37735 - DNA, 15 bp, Homo sapiens
ggctgggaaaatggc

SEQ ID NO: 37736 - DNA, 15 bp, Homo sapiens
gctgggaaaatggca

SEQ ID NO: 37737 - DNA, 15 bp, Homo sapiens
ctgggaaaatggcac

SEQ ID NO: 37738 - DNA, 15 bp, Homo sapiens
tgggaaaatggcact

SEQ ID NO: 37739 - DNA, 15 bp, Homo sapiens
gggaaaatggcactg

SEQ ID NO: 37740 - DNA, 15 bp, Homo sapiens
ggaaaatggcactga

SEQ ID NO: 37741 - DNA, 15 bp, Homo sapiens
gaaaatggcactgac

SEQ ID NO: 37742 - DNA, 15 bp, Homo sapiens
aaaatggcactgacc

SEQ ID NO: 37743 - DNA, 15 bp, Homo sapiens
aaatggcactgacca

SEQ ID NO: 37744 - DNA, 15 bp, Homo sapiens
aatggcactgaccaa

SEQ ID NO: 37745 - DNA, 15 bp, Homo sapiens
atggcactgaccaag

SEQ ID NO: 37746 - DNA, 15 bp, Homo sapiens
tggcactgaccaagg

SEQ ID NO: 37747 - DNA, 15 bp, Homo sapiens
ggcactgaccaaggc

SEQ ID NO: 37748 - DNA, 15 bp, Homo sapiens
gcactgaccaaggct

SEQ ID NO: 37749 - DNA, 15 bp, Homo sapiens
cactgaccaaggctt

SEQ ID NO: 37750 - DNA, 15 bp, Homo sapiens
actgaccaaggcttc

SEQ ID NO: 37751 - DNA, 15 bp, Homo sapiens
ctgaccaaggcttca

SEQ ID NO: 37752 - DNA, 15 bp, Homo sapiens
tgaccaaggcttcat

SEQ ID NO: 37753 - DNA, 15 bp, Homo sapiens
gaccaaggcttcatc

SEQ ID NO: 37754 - DNA, 15 bp, Homo sapiens
accaaggcttcatct

SEQ ID NO: 37755 - DNA, 15 bp, Homo sapiens
ccaaggcttcatctg

SEQ ID NO: 37756 - DNA, 15 bp, Homo sapiens
caaggcttcatctgt

SEQ ID NO: 37757 - DNA, 15 bp, Homo sapiens
aaggcttcatctgtg

SEQ ID NO: 37758 - DNA, 15 bp, Homo sapiens
aggcttcatctgtgg

SEQ ID NO: 37759 - DNA, 15 bp, Homo sapiens
ggcttcatctgtggt

SEQ ID NO: 37760 - DNA, 15 bp, Homo sapiens
gcttcatctgtggtg

SEQ ID NO: 37761 - DNA, 15 bp, Homo sapiens
cttcatctgtggtga

SEQ ID NO: 37762 - DNA, 15 bp, Homo sapiens
ttcatctgtggtgag

SEQ ID NO: 37763 - DNA, 15 bp, Homo sapiens
tcatctgtggtgagc

SEQ ID NO: 37764 - DNA, 15 bp, Homo sapiens
catctgtggtgagcg

SEQ ID NO: 37765 - DNA, 15 bp, Homo sapiens
atctgtggtgagcga

SEQ ID NO: 37766 - DNA, 15 bp, Homo sapiens
tctgtggtgagcgac

SEQ ID NO: 37767 - DNA, 15 bp, Homo sapiens
ctgtggtgagcgacc

SEQ ID NO: 37768 - DNA, 15 bp, Homo sapiens
tgtggtgagcgaccc

SEQ ID NO: 37769 - DNA, 15 bp, Homo sapiens
gtggtgagcgacccc

SEQ ID NO: 37770 - DNA, 15 bp, Homo sapiens
tggtgagcgacccca

SEQ ID NO: 37771 - DNA, 15 bp, Homo sapiens
ggtgagcgaccccag

SEQ ID NO: 37772 - DNA, 15 bp, Homo sapiens
gtgagcgaccccagg

SEQ ID NO: 37773 - DNA, 15 bp, Homo sapiens
tgagcgaccccagga

SEQ ID NO: 37774 - DNA, 15 bp, Homo sapiens
gagcgaccccaggac

SEQ ID NO: 37775 - DNA, 15 bp, Homo sapiens
agcgaccccaggact

SEQ ID NO: 37776 - DNA, 15 bp, Homo sapiens
gcgaccccaggactg

SEQ ID NO: 37777 - DNA, 15 bp, Homo sapiens
cgaccccaggactgg

SEQ ID NO: 37778 - DNA, 15 bp, Homo sapiens
gaccccaggactggt

SEQ ID NO: 37779 - DNA, 15 bp, Homo sapiens
accccaggactggtg

SEQ ID NO: 37780 - DNA, 15 bp, Homo sapiens
ccccaggactggtgg

SEQ ID NO: 37781 - DNA, 15 bp, Homo sapiens
cccaggactggtggt

SEQ ID NO: 37782 - DNA, 15 bp, Homo sapiens
ccaggactggtggtg

SEQ ID NO: 37783 - DNA, 15 bp, Homo sapiens
caggactggtggtgg

SEQ ID NO: 37784 - DNA, 15 bp, Homo sapiens
aggactggtggtggc

SEQ ID NO: 37785 - DNA, 15 bp, Homo sapiens
ggactggtggtggca

SEQ ID NO: 37786 - DNA, 15 bp, Homo sapiens
gactggtggtggcag

SEQ ID NO: 37787 - DNA, 15 bp, Homo sapiens
actggtggtggcaga

SEQ ID NO: 37788 - DNA, 15 bp, Homo sapiens
ctggtggtggcagac

SEQ ID NO: 37789 - DNA, 15 bp, Homo sapiens
tggtggtggcagact

SEQ ID NO: 37790 - DNA, 15 bp, Homo sapiens
ggtggtggcagactc

SEQ ID NO: 37791 - DNA, 15 bp, Homo sapiens
gtggtggcagactca

SEQ ID NO: 37792 - DNA, 15 bp, Homo sapiens
tggtggcagactcag

SEQ ID NO: 37793 - DNA, 15 bp, Homo sapiens
ggtggcagactcaga

SEQ ID NO: 37794 - DNA, 15 bp, Homo sapiens
gtggcagactcagac

SEQ ID NO: 37795 - DNA, 15 bp, Homo sapiens
tggcagactcagact

SEQ ID NO: 37796 - DNA, 15 bp, Homo sapiens
ggcagactcagactg

SEQ ID NO: 37797 - DNA, 15 bp, Homo sapiens
gcagactcagactgc

SEQ ID NO: 37798 - DNA, 15 bp, Homo sapiens
cagactcagactgct

SEQ ID NO: 37799 - DNA, 15 bp, Homo sapiens
agactcagactgctg

SEQ ID NO: 37800 - DNA, 15 bp, Homo sapiens
gactcagactgctgg

SEQ ID NO: 37801 - DNA, 15 bp, Homo sapiens
actcagactgctggg

SEQ ID NO: 37802 - DNA, 15 bp, Homo sapiens
ctcagactgctgggg

SEQ ID NO: 37803 - DNA, 15 bp, Homo sapiens
tcagactgctggggg

SEQ ID NO: 37804 - DNA, 15 bp, Homo sapiens
cagactgctgggggg

SEQ ID NO: 37805 - DNA, 15 bp, Homo sapiens
agactgctggggggc

SEQ ID NO: 37806 - DNA, 15 bp, Homo sapiens
gactgctggggggca

SEQ ID NO: 37807 - DNA, 15 bp, Homo sapiens
actgctggggggcag

SEQ ID NO: 37808 - DNA, 15 bp, Homo sapiens
ctgctggggggcagg

SEQ ID NO: 37809 - DNA, 15 bp, Homo sapiens
tgctggggggcaggg

SEQ ID NO: 37810 - DNA, 15 bp, Homo sapiens
gctggggggcaggga

SEQ ID NO: 37811 - DNA, 15 bp, Homo sapiens
ctggggggcagggag

SEQ ID NO: 37812 - DNA, 15 bp, Homo sapiens
tggggggcagggagg

SEQ ID NO: 37813 - DNA, 15 bp, Homo sapiens
ggggggcagggagga

SEQ ID NO: 37814 - DNA, 15 bp, Homo sapiens
gggggcagggaggag

SEQ ID NO: 37815 - DNA, 15 bp, Homo sapiens
ggggcagggaggagg

SEQ ID NO: 37816 - DNA, 15 bp, Homo sapiens
gggcagggaggaggt

SEQ ID NO: 37817 - DNA, 15 bp, Homo sapiens
ggcagggaggaggtc

SEQ ID NO: 37818 - DNA, 15 bp, Homo sapiens
gcagggaggaggtct

SEQ ID NO: 37819 - DNA, 15 bp, Homo sapiens
cagggaggaggtctg

SEQ ID NO: 37820 - DNA, 15 bp, Homo sapiens
agggaggaggtctgc

SEQ ID NO: 37821 - DNA, 15 bp, Homo sapiens
gggaggaggtctgca

SEQ ID NO: 37822 - DNA, 15 bp, Homo sapiens
ggaggaggtctgcac

SEQ ID NO: 37823 - DNA, 15 bp, Homo sapiens
gaggaggtctgcacg

SEQ ID NO: 37824 - DNA, 15 bp, Homo sapiens
aggaggtctgcacgg

SEQ ID NO: 37825 - DNA, 15 bp, Homo sapiens
ggaggtctgcacggt

SEQ ID NO: 37826 - DNA, 15 bp, Homo sapiens
gaggtctgcacggtg

SEQ ID NO: 37827 - DNA, 15 bp, Homo sapiens
aggtctgcacggtgc

SEQ ID NO: 37828 - DNA, 15 bp, Homo sapiens
ggtctgcacggtgca

SEQ ID NO: 37829 - DNA, 15 bp, Homo sapiens
gtctgcacggtgcag

SEQ ID NO: 37830 - DNA, 15 bp, Homo sapiens
tctgcacggtgcagg

SEQ ID NO: 37831 - DNA, 15 bp, Homo sapiens
ctgcacggtgcaggg

SEQ ID NO: 37832 - DNA, 15 bp, Homo sapiens
tgcacggtgcaggga

SEQ ID NO: 37833 - DNA, 15 bp, Homo sapiens
gcacggtgcagggaa

SEQ ID NO: 37834 - DNA, 15 bp, Homo sapiens
cacggtgcagggaac

SEQ ID NO: 37835 - DNA, 15 bp, Homo sapiens
acggtgcagggaacc

SEQ ID NO: 37836 - DNA, 15 bp, Homo sapiens
cggtgcagggaacct

SEQ ID NO: 37837 - DNA, 15 bp, Homo sapiens
ggtgcagggaaccta

SEQ ID NO: 37838 - DNA, 15 bp, Homo sapiens
gtgcagggaacctaa

SEQ ID NO: 37839 - DNA, 15 bp, Homo sapiens
tgcagggaacctaac

SEQ ID NO: 37840 - DNA, 15 bp, Homo sapiens
gcagggaacctaacc

SEQ ID NO: 37841 - DNA, 15 bp, Homo sapiens
cagggaacctaacct

SEQ ID NO: 37842 - DNA, 15 bp, Homo sapiens
agggaacctaacctc

SEQ ID NO: 37843 - DNA, 15 bp, Homo sapiens
gggaacctaacctca

SEQ ID NO: 37844 - DNA, 15 bp, Homo sapiens
ggaacctaacctcac

SEQ ID NO: 37845 - DNA, 15 bp, Homo sapiens
gaacctaacctcaca

SEQ ID NO: 37846 - DNA, 15 bp, Homo sapiens
aacctaacctcacat

SEQ ID NO: 37847 - DNA, 15 bp, Homo sapiens
acctaacctcacatt

SEQ ID NO: 37848 - DNA, 15 bp, Homo sapiens
cctaacctcacattc

SEQ ID NO: 37849 - DNA, 15 bp, Homo sapiens
ctaacctcacattca

SEQ ID NO: 37850 - DNA, 15 bp, Homo sapiens
taacctcacattcag

SEQ ID NO: 37851 - DNA, 15 bp, Homo sapiens
aacctcacattcagg

SEQ ID NO: 37852 - DNA, 15 bp, Homo sapiens
acctcacattcaggt

SEQ ID NO: 37853 - DNA, 15 bp, Homo sapiens
cctcacattcaggtc

SEQ ID NO: 37854 - DNA, 15 bp, Homo sapiens
ctcacattcaggtcc

SEQ ID NO: 37855 - DNA, 15 bp, Homo sapiens
tcacattcaggtcct

SEQ ID NO: 37856 - DNA, 15 bp, Homo sapiens
cacattcaggtcctg

SEQ ID NO: 37857 - DNA, 15 bp, Homo sapiens
acattcaggtcctga

SEQ ID NO: 37858 - DNA, 15 bp, Homo sapiens
cattcaggtcctgag

SEQ ID NO: 37859 - DNA, 15 bp, Homo sapiens
attcaggtcctgaga

SEQ ID NO: 37860 - DNA, 15 bp, Homo sapiens
ttcaggtcctgagag

SEQ ID NO: 37861 - DNA, 15 bp, Homo sapiens
tcaggtcctgagagc

SEQ ID NO: 37862 - DNA, 15 bp, Homo sapiens
caggtcctgagagct

SEQ ID NO: 37863 - DNA, 15 bp, Homo sapiens
aggtcctgagagcta

SEQ ID NO: 37864 - DNA, 15 bp, Homo sapiens
ggtcctgagagctag

SEQ ID NO: 37865 - DNA, 15 bp, Homo sapiens
gtcctgagagctagg

SEQ ID NO: 37866 - DNA, 15 bp, Homo sapiens
tcctgagagctaggg

SEQ ID NO: 37867 - DNA, 15 bp, Homo sapiens
cctgagagctagggg

SEQ ID NO: 37868 - DNA, 15 bp, Homo sapiens
ctgagagctaggggc

SEQ ID NO: 37869 - DNA, 15 bp, Homo sapiens
tgagagctaggggcc

SEQ ID NO: 37870 - DNA, 15 bp, Homo sapiens
gagagctaggggccc

SEQ ID NO: 37871 - DNA, 15 bp, Homo sapiens
agagctaggggcccc

SEQ ID NO: 37872 - DNA, 15 bp, Homo sapiens
gagctaggggcccct

SEQ ID NO: 37873 - DNA, 15 bp, Homo sapiens
agctaggggcccctg

SEQ ID NO: 37874 - DNA, 15 bp, Homo sapiens
gctaggggcccctgt

SEQ ID NO: 37875 - DNA, 15 bp, Homo sapiens
ctaggggcccctgtc

SEQ ID NO: 37876 - DNA, 15 bp, Homo sapiens
taggggcccctgtcc

SEQ ID NO: 37877 - DNA, 15 bp, Homo sapiens
aggggcccctgtccc

SEQ ID NO: 37878 - DNA, 15 bp, Homo sapiens
ggggcccctgtcccc

SEQ ID NO: 37879 - DNA, 15 bp, Homo sapiens
gggcccctgtcccca

SEQ ID NO: 37880 - DNA, 15 bp, Homo sapiens
ggcccctgtccccag

SEQ ID NO: 37881 - DNA, 15 bp, Homo sapiens
gcccctgtccccagc

SEQ ID NO: 37882 - DNA, 15 bp, Homo sapiens
cccctgtccccagct

SEQ ID NO: 37883 - DNA, 15 bp, Homo sapiens
ccctgtccccagctc

SEQ ID NO: 37884 - DNA, 15 bp, Homo sapiens
cctgtccccagctcc

SEQ ID NO: 37885 - DNA, 15 bp, Homo sapiens
ctgtccccagctcca

SEQ ID NO: 37886 - DNA, 15 bp, Homo sapiens
tgtccccagctccaa

SEQ ID NO: 37887 - DNA, 15 bp, Homo sapiens
gtccccagctccaaa

SEQ ID NO: 37888 - DNA, 15 bp, Homo sapiens
tccccagctccaaac

SEQ ID NO: 37889 - DNA, 15 bp, Homo sapiens
ccccagctccaaaca

SEQ ID NO: 37890 - DNA, 15 bp, Homo sapiens
cccagctccaaacat

SEQ ID NO: 37891 - DNA, 15 bp, Homo sapiens
ccagctccaaacatg

SEQ ID NO: 37892 - DNA, 15 bp, Homo sapiens
cagctccaaacatgc

SEQ ID NO: 37893 - DNA, 15 bp, Homo sapiens
agctccaaacatgcc

SEQ ID NO: 37894 - DNA, 15 bp, Homo sapiens
gctccaaacatgccc

SEQ ID NO: 37895 - DNA, 15 bp, Homo sapiens
ctccaaacatgccca

SEQ ID NO: 37896 - DNA, 15 bp, Homo sapiens
tccaaacatgcccag

SEQ ID NO: 37897 - DNA, 15 bp, Homo sapiens
ccaaacatgcccaga

SEQ ID NO: 37898 - DNA, 15 bp, Homo sapiens
caaacatgcccagac

SEQ ID NO: 37899 - DNA, 15 bp, Homo sapiens
aaacatgcccagacc

SEQ ID NO: 37900 - DNA, 15 bp, Homo sapiens
aacatgcccagacct

SEQ ID NO: 37901 - DNA, 15 bp, Homo sapiens
acatgcccagacctg

SEQ ID NO: 37902 - DNA, 15 bp, Homo sapiens
catgcccagacctgg

SEQ ID NO: 37903 - DNA, 15 bp, Homo sapiens
atgcccagacctgga

SEQ ID NO: 37904 - DNA, 15 bp, Homo sapiens
tgcccagacctggaa

SEQ ID NO: 37905 - DNA, 15 bp, Homo sapiens
gcccagacctggaaa

SEQ ID NO: 37906 - DNA, 15 bp, Homo sapiens
cccagacctggaaat

SEQ ID NO: 37907 - DNA, 15 bp, Homo sapiens
ccagacctggaaatc

SEQ ID NO: 37908 - DNA, 15 bp, Homo sapiens
cagacctggaaatct

SEQ ID NO: 37909 - DNA, 15 bp, Homo sapiens
agacctggaaatctg

SEQ ID NO: 37910 - DNA, 15 bp, Homo sapiens
gacctggaaatctgt

SEQ ID NO: 37911 - DNA, 15 bp, Homo sapiens
acctggaaatctgtc

SEQ ID NO: 37912 - DNA, 15 bp, Homo sapiens
cctggaaatctgtcc

SEQ ID NO: 37913 - DNA, 15 bp, Homo sapiens
ctggaaatctgtccc

SEQ ID NO: 37914 - DNA, 15 bp, Homo sapiens
tggaaatctgtcccc

SEQ ID NO: 37915 - DNA, 15 bp, Homo sapiens
ggaaatctgtcccct

SEQ ID NO: 37916 - DNA, 15 bp, Homo sapiens
gaaatctgtcccctt

SEQ ID NO: 37917 - DNA, 15 bp, Homo sapiens
aaatctgtccccttc

SEQ ID NO: 37918 - DNA, 15 bp, Homo sapiens
aatctgtccccttct

SEQ ID NO: 37919 - DNA, 15 bp, Homo sapiens
atctgtccccttcta

SEQ ID NO: 37920 - DNA, 15 bp, Homo sapiens
tctgtccccttctac

SEQ ID NO: 37921 - DNA, 15 bp, Homo sapiens
ctgtccccttctact

SEQ ID NO: 37922 - DNA, 15 bp, Homo sapiens
tgtccccttctactt

SEQ ID NO: 37923 - DNA, 15 bp, Homo sapiens
gtccccttctactta

SEQ ID NO: 37924 - DNA, 15 bp, Homo sapiens
tccccttctacttac

SEQ ID NO: 37925 - DNA, 15 bp, Homo sapiens
ccccttctacttaca

SEQ ID NO: 37926 - DNA, 15 bp, Homo sapiens
cccttctacttacaa

SEQ ID NO: 37927 - DNA, 15 bp, Homo sapiens
ccttctacttacaaa

SEQ ID NO: 37928 - DNA, 15 bp, Homo sapiens
cttctacttacaaac

SEQ ID NO: 37929 - DNA, 15 bp, Homo sapiens
ttctacttacaaacc

SEQ ID NO: 37930 - DNA, 15 bp, Homo sapiens
tctacttacaaaccc

SEQ ID NO: 37931 - DNA, 15 bp, Homo sapiens
ctacttacaaaccct

SEQ ID NO: 37932 - DNA, 15 bp, Homo sapiens
tacttacaaaccctc

SEQ ID NO: 37933 - DNA, 15 bp, Homo sapiens
acttacaaaccctct

SEQ ID NO: 37934 - DNA, 15 bp, Homo sapiens
cttacaaaccctctg

SEQ ID NO: 37935 - DNA, 15 bp, Homo sapiens
ttacaaaccctctga

SEQ ID NO: 37936 - DNA, 15 bp, Homo sapiens
tacaaaccctctgac

SEQ ID NO: 37937 - DNA, 15 bp, Homo sapiens
acaaaccctctgacc

SEQ ID NO: 37938 - DNA, 15 bp, Homo sapiens
caaaccctctgaccc

SEQ ID NO: 37939 - DNA, 15 bp, Homo sapiens
aaaccctctgacccc

SEQ ID NO: 37940 - DNA, 15 bp, Homo sapiens
aaccctctgaccccg

SEQ ID NO: 37941 - DNA, 15 bp, Homo sapiens
accctctgaccccgg

SEQ ID NO: 37942 - DNA, 15 bp, Homo sapiens
ccctctgaccccggc

SEQ ID NO: 37943 - DNA, 15 bp, Homo sapiens
cctctgaccccggct

SEQ ID NO: 37944 - DNA, 15 bp, Homo sapiens
ctctgaccccggctg

SEQ ID NO: 37945 - DNA, 15 bp, Homo sapiens
tctgaccccggctgg

SEQ ID NO: 37946 - DNA, 15 bp, Homo sapiens
ctgaccccggctggg

SEQ ID NO: 37947 - DNA, 15 bp, Homo sapiens
tgaccccggctgggc

SEQ ID NO: 37948 - DNA, 15 bp, Homo sapiens
gaccccggctgggcg

SEQ ID NO: 37949 - DNA, 15 bp, Homo sapiens
accccggctgggcgt

SEQ ID NO: 37950 - DNA, 15 bp, Homo sapiens
ccccggctgggcgtg

SEQ ID NO: 37951 - DNA, 15 bp, Homo sapiens
cccggctgggcgtgg

SEQ ID NO: 37952 - DNA, 15 bp, Homo sapiens
ccggctgggcgtggt

SEQ ID NO: 37953 - DNA, 15 bp, Homo sapiens
cggctgggcgtggtg

SEQ ID NO: 37954 - DNA, 15 bp, Homo sapiens
ggctgggcgtggtgg

SEQ ID NO: 37955 - DNA, 15 bp, Homo sapiens
gctgggcgtggtggc

SEQ ID NO: 37956 - DNA, 15 bp, Homo sapiens
ctgggcgtggtggct

SEQ ID NO: 37957 - DNA, 15 bp, Homo sapiens
tgggcgtggtggctc

SEQ ID NO: 37958 - DNA, 15 bp, Homo sapiens
gggcgtggtggctca

SEQ ID NO: 37959 - DNA, 15 bp, Homo sapiens
ggcgtggtggctcac

SEQ ID NO: 37960 - DNA, 15 bp, Homo sapiens
gcgtggtggctcacg

SEQ ID NO: 37961 - DNA, 15 bp, Homo sapiens
cgtggtggctcacgc

SEQ ID NO: 37962 - DNA, 15 bp, Homo sapiens
gtggtggctcacgcc

SEQ ID NO: 37963 - DNA, 15 bp, Homo sapiens
tggtggctcacgcct

SEQ ID NO: 37964 - DNA, 15 bp, Homo sapiens
ggtggctcacgcctg

SEQ ID NO: 37965 - DNA, 15 bp, Homo sapiens
gtggctcacgcctgt

SEQ ID NO: 37966 - DNA, 15 bp, Homo sapiens
tggctcacgcctgta

SEQ ID NO: 37967 - DNA, 15 bp, Homo sapiens
ggctcacgcctgtaa

SEQ ID NO: 37968 - DNA, 15 bp, Homo sapiens
gctcacgcctgtaat

SEQ ID NO: 37969 - DNA, 15 bp, Homo sapiens
ctcacgcctgtaatc

SEQ ID NO: 37970 - DNA, 15 bp, Homo sapiens
tcacgcctgtaatcc

SEQ ID NO: 37971 - DNA, 15 bp, Homo sapiens
cacgcctgtaatccc

SEQ ID NO: 37972 - DNA, 15 bp, Homo sapiens
acgcctgtaatccca

SEQ ID NO: 37973 - DNA, 15 bp, Homo sapiens
cgcctgtaatcccag

SEQ ID NO: 37974 - DNA, 15 bp, Homo sapiens
gcctgtaatcccagc

SEQ ID NO: 37975 - DNA, 15 bp, Homo sapiens
cccagcactttggga

SEQ ID NO: 37976 - DNA, 15 bp, Homo sapiens
ccagcactttgggag

SEQ ID NO: 37977 - DNA, 15 bp, Homo sapiens
cagcactttgggagg

SEQ ID NO: 37978 - DNA, 15 bp, Homo sapiens
agcactttgggaggc

SEQ ID NO: 37979 - DNA, 15 bp, Homo sapiens
gcactttgggaggcc

SEQ ID NO: 37980 - DNA, 15 bp, Homo sapiens
cactttgggaggccg

SEQ ID NO: 37981 - DNA, 15 bp, Homo sapiens
actttgggaggccga

SEQ ID NO: 37982 - DNA, 15 bp, Homo sapiens
ctttgggaggccgag

SEQ ID NO: 37983 - DNA, 15 bp, Homo sapiens
tttgggaggccgagg

SEQ ID NO: 37984 - DNA, 15 bp, Homo sapiens
ttgggaggccgaggc

SEQ ID NO: 37985 - DNA, 15 bp, Homo sapiens
tgggaggccgaggcg

SEQ ID NO: 37986 - DNA, 15 bp, Homo sapiens
gggaggccgaggcgg

SEQ ID NO: 37987 - DNA, 15 bp, Homo sapiens
ggaggccgaggcggg

SEQ ID NO: 37988 - DNA, 15 bp, Homo sapiens
gaggccgaggcgggt

SEQ ID NO: 37989 - DNA, 15 bp, Homo sapiens
aggccgaggcgggtg

SEQ ID NO: 37990 - DNA, 15 bp, Homo sapiens
ggccgaggcgggtgg

SEQ ID NO: 37991 - DNA, 15 bp, Homo sapiens
gccgaggcgggtgga

SEQ ID NO: 37992 - DNA, 15 bp, Homo sapiens
ccgaggcgggtggat

SEQ ID NO: 37993 - DNA, 15 bp, Homo sapiens
cgaggcgggtggatc

SEQ ID NO: 37994 - DNA, 15 bp, Homo sapiens
gaggcgggtggatca

SEQ ID NO: 37995 - DNA, 15 bp, Homo sapiens
aggcgggtggatcac

SEQ ID NO: 37996 - DNA, 15 bp, Homo sapiens
ggcgggtggatcacg

SEQ ID NO: 37997 - DNA, 15 bp, Homo sapiens
gcgggtggatcacga

SEQ ID NO: 37998 - DNA, 15 bp, Homo sapiens
cgggtggatcacgag

SEQ ID NO: 37999 - DNA, 15 bp, Homo sapiens
gggtggatcacgagg

SEQ ID NO: 38000 - DNA, 15 bp, Homo sapiens
ggtggatcacgaggt

SEQ ID NO: 38001 - DNA, 15 bp, Homo sapiens
gtggatcacgaggtc

SEQ ID NO: 38002 - DNA, 15 bp, Homo sapiens
tggatcacgaggtca

SEQ ID NO: 38003 - DNA, 15 bp, Homo sapiens
ggatcacgaggtcag

SEQ ID NO: 38004 - DNA, 15 bp, Homo sapiens
gatcacgaggtcagg

SEQ ID NO: 38005 - DNA, 15 bp, Homo sapiens
atcacgaggtcagga

SEQ ID NO: 38006 - DNA, 15 bp, Homo sapiens
tcacgaggtcaggag

SEQ ID NO: 38007 - DNA, 15 bp, Homo sapiens
cacgaggtcaggagt

SEQ ID NO: 38008 - DNA, 15 bp, Homo sapiens
acgaggtcaggagtt

SEQ ID NO: 38009 - DNA, 15 bp, Homo sapiens
cgaggtcaggagttc

SEQ ID NO: 38010 - DNA, 15 bp, Homo sapiens
gaggtcaggagttca

SEQ ID NO: 38011 - DNA, 15 bp, Homo sapiens
aggtcaggagttcaa

SEQ ID NO: 38012 - DNA, 15 bp, Homo sapiens
ggtcaggagttcaag

SEQ ID NO: 38013 - DNA, 15 bp, Homo sapiens
gtcaggagttcaaga

SEQ ID NO: 38014 - DNA, 15 bp, Homo sapiens
tcaggagttcaagac

SEQ ID NO: 38015 - DNA, 15 bp, Homo sapiens
caggagttcaagacc

SEQ ID NO: 38016 - DNA, 15 bp, Homo sapiens
aggagttcaagacca

SEQ ID NO: 38017 - DNA, 15 bp, Homo sapiens
ggagttcaagaccag

SEQ ID NO: 38018 - DNA, 15 bp, Homo sapiens
gagttcaagaccagc

SEQ ID NO: 38019 - DNA, 15 bp, Homo sapiens
agttcaagaccagcc

SEQ ID NO: 38020 - DNA, 15 bp, Homo sapiens
gttcaagaccagcct

SEQ ID NO: 38021 - DNA, 15 bp, Homo sapiens
ttcaagaccagcctc

SEQ ID NO: 38022 - DNA, 15 bp, Homo sapiens
tcaagaccagcctcg

SEQ ID NO: 38023 - DNA, 15 bp, Homo sapiens
caagaccagcctcgc

SEQ ID NO: 38024 - DNA, 15 bp, Homo sapiens
aagaccagcctcgcc

SEQ ID NO: 38025 - DNA, 15 bp, Homo sapiens
agaccagcctcgcca

SEQ ID NO: 38026 - DNA, 15 bp, Homo sapiens
gaccagcctcgccaa

SEQ ID NO: 38027 - DNA, 15 bp, Homo sapiens
accagcctcgccaag

SEQ ID NO: 38028 - DNA, 15 bp, Homo sapiens
ccagcctcgccaaga

SEQ ID NO: 38029 - DNA, 15 bp, Homo sapiens
cagcctcgccaagat

SEQ ID NO: 38030 - DNA, 15 bp, Homo sapiens
agcctcgccaagatg

SEQ ID NO: 38031 - DNA, 15 bp, Homo sapiens
gcctcgccaagatgg

SEQ ID NO: 38032 - DNA, 15 bp, Homo sapiens
cctcgccaagatggt

SEQ ID NO: 38033 - DNA, 15 bp, Homo sapiens
ctcgccaagatggtg

SEQ ID NO: 38034 - DNA, 15 bp, Homo sapiens
tcgccaagatggtga

SEQ ID NO: 38035 - DNA, 15 bp, Homo sapiens
cgccaagatggtgaa

SEQ ID NO: 38036 - DNA, 15 bp, Homo sapiens
gccaagatggtgaaa

SEQ ID NO: 38037 - DNA, 15 bp, Homo sapiens
ccaagatggtgaaac

SEQ ID NO: 38038 - DNA, 15 bp, Homo sapiens
caagatggtgaaacc

SEQ ID NO: 38039 - DNA, 15 bp, Homo sapiens
aagatggtgaaaccc

SEQ ID NO: 38040 - DNA, 15 bp, Homo sapiens
agatggtgaaaccct

SEQ ID NO: 38041 - DNA, 15 bp, Homo sapiens
gatggtgaaaccctg

SEQ ID NO: 38042 - DNA, 15 bp, Homo sapiens
atggtgaaaccctgt

SEQ ID NO: 38043 - DNA, 15 bp, Homo sapiens
tggtgaaaccctgtg

SEQ ID NO: 38044 - DNA, 15 bp, Homo sapiens
ggtgaaaccctgtgt

SEQ ID NO: 38045 - DNA, 15 bp, Homo sapiens
gtgaaaccctgtgtc

SEQ ID NO: 38046 - DNA, 15 bp, Homo sapiens
tgaaaccctgtgtct

SEQ ID NO: 38047 - DNA, 15 bp, Homo sapiens
gaaaccctgtgtcta

SEQ ID NO: 38048 - DNA, 15 bp, Homo sapiens
aaaccctgtgtctac

SEQ ID NO: 38049 - DNA, 15 bp, Homo sapiens
aaccctgtgtctact

SEQ ID NO: 38050 - DNA, 15 bp, Homo sapiens
accctgtgtctacta

SEQ ID NO: 38051 - DNA, 15 bp, Homo sapiens
ccctgtgtctactaa

SEQ ID NO: 38052 - DNA, 15 bp, Homo sapiens
cctgtgtctactaaa

SEQ ID NO: 38053 - DNA, 15 bp, Homo sapiens
ctgtgtctactaaaa

SEQ ID NO: 38054 - DNA, 15 bp, Homo sapiens
tgtgtctactaaaag

SEQ ID NO: 38055 - DNA, 15 bp, Homo sapiens
gtgtctactaaaagt

SEQ ID NO: 38056 - DNA, 15 bp, Homo sapiens
tgtctactaaaagta

SEQ ID NO: 38057 - DNA, 15 bp, Homo sapiens
gtctactaaaagtac

SEQ ID NO: 38058 - DNA, 15 bp, Homo sapiens
tctactaaaagtaca

SEQ ID NO: 38059 - DNA, 15 bp, Homo sapiens
ctactaaaagtacaa

SEQ ID NO: 38060 - DNA, 15 bp, Homo sapiens
tactaaaagtacaaa

SEQ ID NO: 38061 - DNA, 15 bp, Homo sapiens
actaaaagtacaaaa

SEQ ID NO: 38062 - DNA, 15 bp, Homo sapiens
ctaaaagtacaaaaa

SEQ ID NO: 38063 - DNA, 15 bp, Homo sapiens
taaaagtacaaaaaa

SEQ ID NO: 38064 - DNA, 15 bp, Homo sapiens
aaaagtacaaaaaat

SEQ ID NO: 38065 - DNA, 15 bp, Homo sapiens
aaagtacaaaaaatt

SEQ ID NO: 38066 - DNA, 15 bp, Homo sapiens
aagtacaaaaaatta

SEQ ID NO: 38067 - DNA, 15 bp, Homo sapiens
agtacaaaaaattag

SEQ ID NO: 38068 - DNA, 15 bp, Homo sapiens
gtacaaaaaattagc

SEQ ID NO: 38069 - DNA, 15 bp, Homo sapiens
tacaaaaaattagcc

SEQ ID NO: 38070 - DNA, 15 bp, Homo sapiens
acaaaaaattagcca

SEQ ID NO: 38071 - DNA, 15 bp, Homo sapiens
caaaaaattagccag

SEQ ID NO: 38072 - DNA, 15 bp, Homo sapiens
aaaaaattagccagg

SEQ ID NO: 38073 - DNA, 15 bp, Homo sapiens
aaaaattagccaggc

SEQ ID NO: 38074 - DNA, 15 bp, Homo sapiens
aaaattagccaggcg

SEQ ID NO: 38075 - DNA, 15 bp, Homo sapiens
aaattagccaggcgt

SEQ ID NO: 38076 - DNA, 15 bp, Homo sapiens
aattagccaggcgtg

SEQ ID NO: 38077 - DNA, 15 bp, Homo sapiens
attagccaggcgtgg

SEQ ID NO: 38078 - DNA, 15 bp, Homo sapiens
ttagccaggcgtggt

SEQ ID NO: 38079 - DNA, 15 bp, Homo sapiens
tagccaggcgtggtg

SEQ ID NO: 38080 - DNA, 15 bp, Homo sapiens
agccaggcgtggtgg

SEQ ID NO: 38081 - DNA, 15 bp, Homo sapiens
gccaggcgtggtggc

SEQ ID NO: 38082 - DNA, 15 bp, Homo sapiens
ccaggcgtggtggca

SEQ ID NO: 38083 - DNA, 15 bp, Homo sapiens
caggcgtggtggcag

SEQ ID NO: 38084 - DNA, 15 bp, Homo sapiens
aggcgtggtggcagg

SEQ ID NO: 38085 - DNA, 15 bp, Homo sapiens
ggcgtggtggcaggt

SEQ ID NO: 38086 - DNA, 15 bp, Homo sapiens
gcgtggtggcaggtg

SEQ ID NO: 38087 - DNA, 15 bp, Homo sapiens
cgtggtggcaggtgt

SEQ ID NO: 38088 - DNA, 15 bp, Homo sapiens
gtggtggcaggtgtc

SEQ ID NO: 38089 - DNA, 15 bp, Homo sapiens
tggtggcaggtgtct

SEQ ID NO: 38090 - DNA, 15 bp, Homo sapiens
ggtggcaggtgtctg

SEQ ID NO: 38091 - DNA, 15 bp, Homo sapiens
gtggcaggtgtctgt

SEQ ID NO: 38092 - DNA, 15 bp, Homo sapiens
tggcaggtgtctgta

SEQ ID NO: 38093 - DNA, 15 bp, Homo sapiens
ggcaggtgtctgtag

SEQ ID NO: 38094 - DNA, 15 bp, Homo sapiens
gcaggtgtctgtagt

SEQ ID NO: 38095 - DNA, 15 bp, Homo sapiens
caggtgtctgtagtc

SEQ ID NO: 38096 - DNA, 15 bp, Homo sapiens
aggtgtctgtagtcc

SEQ ID NO: 38097 - DNA, 15 bp, Homo sapiens
ggtgtctgtagtccc

SEQ ID NO: 38098 - DNA, 15 bp, Homo sapiens
gtgtctgtagtccca

SEQ ID NO: 38099 - DNA, 15 bp, Homo sapiens
tgtctgtagtcccaa

SEQ ID NO: 38100 - DNA, 15 bp, Homo sapiens
gtctgtagtcccaac

SEQ ID NO: 38101 - DNA, 15 bp, Homo sapiens
tctgtagtcccaact

SEQ ID NO: 38102 - DNA, 15 bp, Homo sapiens
ctgtagtcccaacta

SEQ ID NO: 38103 - DNA, 15 bp, Homo sapiens
tgtagtcccaactac

SEQ ID NO: 38104 - DNA, 15 bp, Homo sapiens
gtagtcccaactact

SEQ ID NO: 38105 - DNA, 15 bp, Homo sapiens
tagtcccaactactt

SEQ ID NO: 38106 - DNA, 15 bp, Homo sapiens
agtcccaactacttg

SEQ ID NO: 38107 - DNA, 15 bp, Homo sapiens
gtcccaactacttgg

SEQ ID NO: 38108 - DNA, 15 bp, Homo sapiens
tcccaactacttggg

SEQ ID NO: 38109 - DNA, 15 bp, Homo sapiens
cccaactacttggga

SEQ ID NO: 38110 - DNA, 15 bp, Homo sapiens
ccaactacttgggag

SEQ ID NO: 38111 - DNA, 15 bp, Homo sapiens
caactacttgggagg

SEQ ID NO: 38112 - DNA, 15 bp, Homo sapiens
aactacttgggaggc

SEQ ID NO: 38113 - DNA, 15 bp, Homo sapiens
actacttgggaggct

SEQ ID NO: 38114 - DNA, 15 bp, Homo sapiens
ctacttgggaggctg

SEQ ID NO: 38115 - DNA, 15 bp, Homo sapiens
tacttgggaggctga

SEQ ID NO: 38116 - DNA, 15 bp, Homo sapiens
acttgggaggctgag

SEQ ID NO: 38117 - DNA, 15 bp, Homo sapiens
cttgggaggctgagg

SEQ ID NO: 38118 - DNA, 15 bp, Homo sapiens
ttgggaggctgaggc

SEQ ID NO: 38119 - DNA, 15 bp, Homo sapiens
tgggaggctgaggca

SEQ ID NO: 38120 - DNA, 15 bp, Homo sapiens
gggaggctgaggcag

SEQ ID NO: 38121 - DNA, 15 bp, Homo sapiens
ggaggctgaggcaga

SEQ ID NO: 38122 - DNA, 15 bp, Homo sapiens
gaggctgaggcagag

SEQ ID NO: 38123 - DNA, 15 bp, Homo sapiens
aggctgaggcagaga

SEQ ID NO: 38124 - DNA, 15 bp, Homo sapiens
ggctgaggcagagaa

SEQ ID NO: 38125 - DNA, 15 bp, Homo sapiens
gctgaggcagagaat

SEQ ID NO: 38126 - DNA, 15 bp, Homo sapiens
ctgaggcagagaatt

SEQ ID NO: 38127 - DNA, 15 bp, Homo sapiens
tgaggcagagaattg

SEQ ID NO: 38128 - DNA, 15 bp, Homo sapiens
gaggcagagaattgc

SEQ ID NO: 38129 - DNA, 15 bp, Homo sapiens
aggcagagaattgct

SEQ ID NO: 38130 - DNA, 15 bp, Homo sapiens
ggcagagaattgctt

SEQ ID NO: 38131 - DNA, 15 bp, Homo sapiens
gcagagaattgcttg

SEQ ID NO: 38132 - DNA, 15 bp, Homo sapiens
cagagaattgcttga

SEQ ID NO: 38133 - DNA, 15 bp, Homo sapiens
agagaattgcttgaa

SEQ ID NO: 38134 - DNA, 15 bp, Homo sapiens
gagaattgcttgaac

SEQ ID NO: 38135 - DNA, 15 bp, Homo sapiens
agaattgcttgaacc

SEQ ID NO: 38136 - DNA, 15 bp, Homo sapiens
gaattgcttgaacct

SEQ ID NO: 38137 - DNA, 15 bp, Homo sapiens
aattgcttgaacctg

SEQ ID NO: 38138 - DNA, 15 bp, Homo sapiens
attgcttgaacctgg

SEQ ID NO: 38139 - DNA, 15 bp, Homo sapiens
ttgcttgaacctggg

SEQ ID NO: 38140 - DNA, 15 bp, Homo sapiens
tgcttgaacctggga

SEQ ID NO: 38141 - DNA, 15 bp, Homo sapiens
gcttgaacctgggag

SEQ ID NO: 38142 - DNA, 15 bp, Homo sapiens
cttgaacctgggagg

SEQ ID NO: 38143 - DNA, 15 bp, Homo sapiens
ttgaacctgggaggc

SEQ ID NO: 38144 - DNA, 15 bp, Homo sapiens
tgaacctgggaggcg

SEQ ID NO: 38145 - DNA, 15 bp, Homo sapiens
gaacctgggaggcgg

SEQ ID NO: 38146 - DNA, 15 bp, Homo sapiens
aacctgggaggcgga

SEQ ID NO: 38147 - DNA, 15 bp, Homo sapiens
acctgggaggcggag

SEQ ID NO: 38148 - DNA, 15 bp, Homo sapiens
cctgggaggcggagt

SEQ ID NO: 38149 - DNA, 15 bp, Homo sapiens
ctgggaggcggagtt

SEQ ID NO: 38150 - DNA, 15 bp, Homo sapiens
tgggaggcggagttt

SEQ ID NO: 38151 - DNA, 15 bp, Homo sapiens
gggaggcggagtttg

SEQ ID NO: 38152 - DNA, 15 bp, Homo sapiens
ggaggcggagtttgc

SEQ ID NO: 38153 - DNA, 15 bp, Homo sapiens
gaggcggagtttgca

SEQ ID NO: 38154 - DNA, 15 bp, Homo sapiens
aggcggagtttgcag

SEQ ID NO: 38155 - DNA, 15 bp, Homo sapiens
ggcggagtttgcagt

SEQ ID NO: 38156 - DNA, 15 bp, Homo sapiens
gcggagtttgcagtg

SEQ ID NO: 38157 - DNA, 15 bp, Homo sapiens
cggagtttgcagtga

SEQ ID NO: 38158 - DNA, 15 bp, Homo sapiens
ggagtttgcagtgag

SEQ ID NO: 38159 - DNA, 15 bp, Homo sapiens
gagtttgcagtgagc

SEQ ID NO: 38160 - DNA, 15 bp, Homo sapiens
agtttgcagtgagct

SEQ ID NO: 38161 - DNA, 15 bp, Homo sapiens
gtttgcagtgagctg

SEQ ID NO: 38162 - DNA, 15 bp, Homo sapiens
tttgcagtgagctga

SEQ ID NO: 38163 - DNA, 15 bp, Homo sapiens
ttgcagtgagctgag

SEQ ID NO: 38164 - DNA, 15 bp, Homo sapiens
tgcagtgagctgaga

SEQ ID NO: 38165 - DNA, 15 bp, Homo sapiens
gcagtgagctgagat

SEQ ID NO: 38166 - DNA, 15 bp, Homo sapiens
cagtgagctgagatc

SEQ ID NO: 38167 - DNA, 15 bp, Homo sapiens
agtgagctgagatca

SEQ ID NO: 38168 - DNA, 15 bp, Homo sapiens
gtgagctgagatcat

SEQ ID NO: 38169 - DNA, 15 bp, Homo sapiens
tgagctgagatcata

SEQ ID NO: 38170 - DNA, 15 bp, Homo sapiens
gagctgagatcatac

SEQ ID NO: 38171 - DNA, 15 bp, Homo sapiens
agctgagatcatacc

SEQ ID NO: 38172 - DNA, 15 bp, Homo sapiens
gctgagatcatacca

SEQ ID NO: 38173 - DNA, 15 bp, Homo sapiens
ctgagatcataccac

SEQ ID NO: 38174 - DNA, 15 bp, Homo sapiens
tgagatcataccact

SEQ ID NO: 38175 - DNA, 15 bp, Homo sapiens
gagatcataccactg

SEQ ID NO: 38176 - DNA, 15 bp, Homo sapiens
agatcataccactgc

SEQ ID NO: 38177 - DNA, 15 bp, Homo sapiens
gatcataccactgca

SEQ ID NO: 38178 - DNA, 15 bp, Homo sapiens
atcataccactgcac

SEQ ID NO: 38179 - DNA, 15 bp, Homo sapiens
tcataccactgcact

SEQ ID NO: 38180 - DNA, 15 bp, Homo sapiens
cataccactgcactc

SEQ ID NO: 38181 - DNA, 15 bp, Homo sapiens
ataccactgcactcc

SEQ ID NO: 38182 - DNA, 15 bp, Homo sapiens
taccactgcactcca

SEQ ID NO: 38183 - DNA, 15 bp, Homo sapiens
accactgcactccag

SEQ ID NO: 38184 - DNA, 15 bp, Homo sapiens
ccactgcactccagc

SEQ ID NO: 38185 - DNA, 15 bp, Homo sapiens
cactgcactccagcc

SEQ ID NO: 38186 - DNA, 15 bp, Homo sapiens
ctgcactccagccta

SEQ ID NO: 38187 - DNA, 15 bp, Homo sapiens
tgcactccagcctag

SEQ ID NO: 38188 - DNA, 15 bp, Homo sapiens
gcactccagcctagg

SEQ ID NO: 38189 - DNA, 15 bp, Homo sapiens
cactccagcctaggc

SEQ ID NO: 38190 - DNA, 15 bp, Homo sapiens
actccagcctaggcg

SEQ ID NO: 38191 - DNA, 15 bp, Homo sapiens
ctccagcctaggcga

SEQ ID NO: 38192 - DNA, 15 bp, Homo sapiens
tccagcctaggcgac

SEQ ID NO: 38193 - DNA, 15 bp, Homo sapiens
ccagcctaggcgaca

SEQ ID NO: 38194 - DNA, 15 bp, Homo sapiens
cagcctaggcgacag

SEQ ID NO: 38195 - DNA, 15 bp, Homo sapiens
agcctaggcgacaga

SEQ ID NO: 38196 - DNA, 15 bp, Homo sapiens
gcctaggcgacagat

SEQ ID NO: 38197 - DNA, 15 bp, Homo sapiens
cctaggcgacagatc

SEQ ID NO: 38198 - DNA, 15 bp, Homo sapiens
ctaggcgacagatca

SEQ ID NO: 38199 - DNA, 15 bp, Homo sapiens
taggcgacagatcaa

SEQ ID NO: 38200 - DNA, 15 bp, Homo sapiens
aggcgacagatcaag

SEQ ID NO: 38201 - DNA, 15 bp, Homo sapiens
ggcgacagatcaaga

SEQ ID NO: 38202 - DNA, 15 bp, Homo sapiens
gcgacagatcaagac

SEQ ID NO: 38203 - DNA, 15 bp, Homo sapiens
cgacagatcaagact

SEQ ID NO: 38204 - DNA, 15 bp, Homo sapiens
gacagatcaagactc

SEQ ID NO: 38205 - DNA, 15 bp, Homo sapiens
acagatcaagactcc

SEQ ID NO: 38206 - DNA, 15 bp, Homo sapiens
cagatcaagactccg

SEQ ID NO: 38207 - DNA, 15 bp, Homo sapiens
agatcaagactccgt

SEQ ID NO: 38208 - DNA, 15 bp, Homo sapiens
gatcaagactccgtc

SEQ ID NO: 38209 - DNA, 15 bp, Homo sapiens
atcaagactccgtct

SEQ ID NO: 38210 - DNA, 15 bp, Homo sapiens
tcaagactccgtctc

SEQ ID NO: 38211 - DNA, 15 bp, Homo sapiens
caagactccgtctca

SEQ ID NO: 38212 - DNA, 15 bp, Homo sapiens
aagactccgtctcaa

SEQ ID NO: 38213 - DNA, 15 bp, Homo sapiens
agactccgtctcaag

SEQ ID NO: 38214 - DNA, 15 bp, Homo sapiens
gactccgtctcaaga

SEQ ID NO: 38215 - DNA, 15 bp, Homo sapiens
actccgtctcaagaa

SEQ ID NO: 38216 - DNA, 15 bp, Homo sapiens
ctccgtctcaagaaa

SEQ ID NO: 38217 - DNA, 15 bp, Homo sapiens
tccgtctcaagaaaa

SEQ ID NO: 38218 - DNA, 15 bp, Homo sapiens
ccgtctcaagaaaaa

SEQ ID NO: 38219 - DNA, 15 bp, Homo sapiens
cgtctcaagaaaaaa

SEQ ID NO: 38220 - DNA, 15 bp, Homo sapiens
gtctcaagaaaaaaa

SEQ ID NO: 38221 - DNA, 15 bp, Homo sapiens
tctcaagaaaaaaaa

SEQ ID NO: 38222 - DNA, 15 bp, Homo sapiens
ctcaagaaaaaaaaa

SEQ ID NO: 38223 - DNA, 15 bp, Homo sapiens
tcaagaaaaaaaaaa

SEQ ID NO: 38224 - DNA, 15 bp, Homo sapiens
caagaaaaaaaaaaa

SEQ ID NO: 38225 - DNA, 15 bp, Homo sapiens
aagaaaaaaaaaaaa

SEQ ID NO: 38226 - DNA, 15 bp, Homo sapiens
agaaaaaaaaaaaaa

SEQ ID NO: 38227 - DNA, 15 bp, Homo sapiens
gaaaaaaaaaaaaaa

SEQ ID NO: 38228 - DNA, 15 bp, Homo sapiens
aaaaaaaaaaaaaac

SEQ ID NO: 38229 - DNA, 15 bp, Homo sapiens
aaaaaaaaaaaaacc

SEQ ID NO: 38230 - DNA, 15 bp, Homo sapiens
aaaaaaaaaaaaccc

SEQ ID NO: 38231 - DNA, 15 bp, Homo sapiens
aaaaaaaaaaaccct

SEQ ID NO: 38232 - DNA, 15 bp, Homo sapiens
aaaaaaaaaaccctc

SEQ ID NO: 38233 - DNA, 15 bp, Homo sapiens
aaaaaaaaaccctct

SEQ ID NO: 38234 - DNA, 15 bp, Homo sapiens
aaaaaaaaccctctg

SEQ ID NO: 38235 - DNA, 15 bp, Homo sapiens
aaaaaaaccctctga

SEQ ID NO: 38236 - DNA, 15 bp, Homo sapiens
aaaaaaccctctgac

SEQ ID NO: 38237 - DNA, 15 bp, Homo sapiens
aaaaaccctctgact

SEQ ID NO: 38238 - DNA, 15 bp, Homo sapiens
aaaaccctctgactc

SEQ ID NO: 38239 - DNA, 15 bp, Homo sapiens
aaaccctctgactct

SEQ ID NO: 38240 - DNA, 15 bp, Homo sapiens
aaccctctgactcta

SEQ ID NO: 38241 - DNA, 15 bp, Homo sapiens
accctctgactctaa

SEQ ID NO: 38242 - DNA, 15 bp, Homo sapiens
ccctctgactctaag

SEQ ID NO: 38243 - DNA, 15 bp, Homo sapiens
cctctgactctaaga

SEQ ID NO: 38244 - DNA, 15 bp, Homo sapiens
ctctgactctaagat

SEQ ID NO: 38245 - DNA, 15 bp, Homo sapiens
tctgactctaagatc

SEQ ID NO: 38246 - DNA, 15 bp, Homo sapiens
ctgactctaagatcc

SEQ ID NO: 38247 - DNA, 15 bp, Homo sapiens
tgactctaagatccc

SEQ ID NO: 38248 - DNA, 15 bp, Homo sapiens
gactctaagatcccc

SEQ ID NO: 38249 - DNA, 15 bp, Homo sapiens
actctaagatcccca

SEQ ID NO: 38250 - DNA, 15 bp, Homo sapiens
ctctaagatccccaa

SEQ ID NO: 38251 - DNA, 15 bp, Homo sapiens
tctaagatccccaaa

SEQ ID NO: 38252 - DNA, 15 bp, Homo sapiens
ctaagatccccaaac

SEQ ID NO: 38253 - DNA, 15 bp, Homo sapiens
taagatccccaaaca

SEQ ID NO: 38254 - DNA, 15 bp, Homo sapiens
aagatccccaaacac

SEQ ID NO: 38255 - DNA, 15 bp, Homo sapiens
agatccccaaacact

SEQ ID NO: 38256 - DNA, 15 bp, Homo sapiens
gatccccaaacactg

SEQ ID NO: 38257 - DNA, 15 bp, Homo sapiens
atccccaaacactgt

SEQ ID NO: 38258 - DNA, 15 bp, Homo sapiens
tccccaaacactgtg

SEQ ID NO: 38259 - DNA, 15 bp, Homo sapiens
ccccaaacactgtga

SEQ ID NO: 38260 - DNA, 15 bp, Homo sapiens
cccaaacactgtgat

SEQ ID NO: 38261 - DNA, 15 bp, Homo sapiens
ccaaacactgtgatc

SEQ ID NO: 38262 - DNA, 15 bp, Homo sapiens
caaacactgtgatcc

SEQ ID NO: 38263 - DNA, 15 bp, Homo sapiens
aaacactgtgatcct

SEQ ID NO: 38264 - DNA, 15 bp, Homo sapiens
aacactgtgatcctg

SEQ ID NO: 38265 - DNA, 15 bp, Homo sapiens
acactgtgatcctga

SEQ ID NO: 38266 - DNA, 15 bp, Homo sapiens
cactgtgatcctgag

SEQ ID NO: 38267 - DNA, 15 bp, Homo sapiens
actgtgatcctgagt

SEQ ID NO: 38268 - DNA, 15 bp, Homo sapiens
ctgtgatcctgagtt

SEQ ID NO: 38269 - DNA, 15 bp, Homo sapiens
tgtgatcctgagttg

SEQ ID NO: 38270 - DNA, 15 bp, Homo sapiens
gtgatcctgagttgt

SEQ ID NO: 38271 - DNA, 15 bp, Homo sapiens
tgatcctgagttgtt

SEQ ID NO: 38272 - DNA, 15 bp, Homo sapiens
gatcctgagttgtta

SEQ ID NO: 38273 - DNA, 15 bp, Homo sapiens
atcctgagttgttaa

SEQ ID NO: 38274 - DNA, 15 bp, Homo sapiens
tcctgagttgttaaa

SEQ ID NO: 38275 - DNA, 15 bp, Homo sapiens
cctgagttgttaaag

SEQ ID NO: 38276 - DNA, 15 bp, Homo sapiens
ctgagttgttaaagc

SEQ ID NO: 38277 - DNA, 15 bp, Homo sapiens
tgagttgttaaagca

SEQ ID NO: 38278 - DNA, 15 bp, Homo sapiens
gagttgttaaagcaa

SEQ ID NO: 38279 - DNA, 15 bp, Homo sapiens
agttgttaaagcaaa

SEQ ID NO: 38280 - DNA, 15 bp, Homo sapiens
gttgttaaagcaaat

SEQ ID NO: 38281 - DNA, 15 bp, Homo sapiens
ttgttaaagcaaatg

SEQ ID NO: 38282 - DNA, 15 bp, Homo sapiens
tgttaaagcaaatgc

SEQ ID NO: 38283 - DNA, 15 bp, Homo sapiens
gttaaagcaaatgca

SEQ ID NO: 38284 - DNA, 15 bp, Homo sapiens
ttaaagcaaatgcaa

SEQ ID NO: 38285 - DNA, 15 bp, Homo sapiens
taaagcaaatgcaaa

SEQ ID NO: 38286 - DNA, 15 bp, Homo sapiens
aaagcaaatgcaaat

SEQ ID NO: 38287 - DNA, 15 bp, Homo sapiens
aagcaaatgcaaata

SEQ ID NO: 38288 - DNA, 15 bp, Homo sapiens
agcaaatgcaaatag

SEQ ID NO: 38289 - DNA, 15 bp, Homo sapiens
gcaaatgcaaatagc

SEQ ID NO: 38290 - DNA, 15 bp, Homo sapiens
caaatgcaaatagcc

SEQ ID NO: 38291 - DNA, 15 bp, Homo sapiens
aaatgcaaatagcca

SEQ ID NO: 38292 - DNA, 15 bp, Homo sapiens
aatgcaaatagccag

SEQ ID NO: 38293 - DNA, 15 bp, Homo sapiens
atgcaaatagccaga

SEQ ID NO: 38294 - DNA, 15 bp, Homo sapiens
tgcaaatagccagac

SEQ ID NO: 38295 - DNA, 15 bp, Homo sapiens
gcaaatagccagact

SEQ ID NO: 38296 - DNA, 15 bp, Homo sapiens
caaatagccagactt

SEQ ID NO: 38297 - DNA, 15 bp, Homo sapiens
aaatagccagacttg

SEQ ID NO: 38298 - DNA, 15 bp, Homo sapiens
aatagccagacttgc

SEQ ID NO: 38299 - DNA, 15 bp, Homo sapiens
atagccagacttgcc

SEQ ID NO: 38300 - DNA, 15 bp, Homo sapiens
tagccagacttgcca

SEQ ID NO: 38301 - DNA, 15 bp, Homo sapiens
agccagacttgccag

SEQ ID NO: 38302 - DNA, 15 bp, Homo sapiens
gccagacttgccaga

SEQ ID NO: 38303 - DNA, 15 bp, Homo sapiens
ccagacttgccagat

SEQ ID NO: 38304 - DNA, 15 bp, Homo sapiens
cagacttgccagatg

SEQ ID NO: 38305 - DNA, 15 bp, Homo sapiens
agacttgccagatgc

SEQ ID NO: 38306 - DNA, 15 bp, Homo sapiens
gacttgccagatgca

SEQ ID NO: 38307 - DNA, 15 bp, Homo sapiens
acttgccagatgcag

SEQ ID NO: 38308 - DNA, 15 bp, Homo sapiens
cttgccagatgcagg

SEQ ID NO: 38309 - DNA, 15 bp, Homo sapiens
ttgccagatgcaggc

SEQ ID NO: 38310 - DNA, 15 bp, Homo sapiens
tgccagatgcaggct

SEQ ID NO: 38311 - DNA, 15 bp, Homo sapiens
gccagatgcaggctg

SEQ ID NO: 38312 - DNA, 15 bp, Homo sapiens
ccagatgcaggctgt

SEQ ID NO: 38313 - DNA, 15 bp, Homo sapiens
cagatgcaggctgtg

SEQ ID NO: 38314 - DNA, 15 bp, Homo sapiens
agatgcaggctgtgt

SEQ ID NO: 38315 - DNA, 15 bp, Homo sapiens
gatgcaggctgtgtg

SEQ ID NO: 38316 - DNA, 15 bp, Homo sapiens
atgcaggctgtgtgc

SEQ ID NO: 38317 - DNA, 15 bp, Homo sapiens
tgcaggctgtgtgcc

SEQ ID NO: 38318 - DNA, 15 bp, Homo sapiens
gcaggctgtgtgcca

SEQ ID NO: 38319 - DNA, 15 bp, Homo sapiens
caggctgtgtgccag

SEQ ID NO: 38320 - DNA, 15 bp, Homo sapiens
aggctgtgtgccagc

SEQ ID NO: 38321 - DNA, 15 bp, Homo sapiens
ggctgtgtgccagca

SEQ ID NO: 38322 - DNA, 15 bp, Homo sapiens
gctgtgtgccagcag

SEQ ID NO: 38323 - DNA, 15 bp, Homo sapiens
ctgtgtgccagcagg

SEQ ID NO: 38324 - DNA, 15 bp, Homo sapiens
tgtgtgccagcagga

SEQ ID NO: 38325 - DNA, 15 bp, Homo sapiens
gtgtgccagcaggac

SEQ ID NO: 38326 - DNA, 15 bp, Homo sapiens
tgtgccagcaggacc

SEQ ID NO: 38327 - DNA, 15 bp, Homo sapiens
gtgccagcaggacca

SEQ ID NO: 38328 - DNA, 15 bp, Homo sapiens
tgccagcaggaccag

SEQ ID NO: 38329 - DNA, 15 bp, Homo sapiens
gccagcaggaccagc

SEQ ID NO: 38330 - DNA, 15 bp, Homo sapiens
ccagcaggaccagct

SEQ ID NO: 38331 - DNA, 15 bp, Homo sapiens
cagcaggaccagcta

SEQ ID NO: 38332 - DNA, 15 bp, Homo sapiens
agcaggaccagctat

SEQ ID NO: 38333 - DNA, 15 bp, Homo sapiens
gcaggaccagctatg

SEQ ID NO: 38334 - DNA, 15 bp, Homo sapiens
caggaccagctatgt

SEQ ID NO: 38335 - DNA, 15 bp, Homo sapiens
aggaccagctatgta

SEQ ID NO: 38336 - DNA, 15 bp, Homo sapiens
ggaccagctatgtaa

SEQ ID NO: 38337 - DNA, 15 bp, Homo sapiens
gaccagctatgtaac

SEQ ID NO: 38338 - DNA, 15 bp, Homo sapiens
accagctatgtaacc

SEQ ID NO: 38339 - DNA, 15 bp, Homo sapiens
ccagctatgtaacct

SEQ ID NO: 38340 - DNA, 15 bp, Homo sapiens
cagctatgtaacctg

SEQ ID NO: 38341 - DNA, 15 bp, Homo sapiens
agctatgtaacctgc

SEQ ID NO: 38342 - DNA, 15 bp, Homo sapiens
gctatgtaacctgca

SEQ ID NO: 38343 - DNA, 15 bp, Homo sapiens
ctatgtaacctgcag

SEQ ID NO: 38344 - DNA, 15 bp, Homo sapiens
tatgtaacctgcagg

SEQ ID NO: 38345 - DNA, 15 bp, Homo sapiens
atgtaacctgcaggg

SEQ ID NO: 38346 - DNA, 15 bp, Homo sapiens
tgtaacctgcagggc

SEQ ID NO: 38347 - DNA, 15 bp, Homo sapiens
gtaacctgcagggcc

SEQ ID NO: 38348 - DNA, 15 bp, Homo sapiens
taacctgcagggccc

SEQ ID NO: 38349 - DNA, 15 bp, Homo sapiens
aacctgcagggcccc

SEQ ID NO: 38350 - DNA, 15 bp, Homo sapiens
acctgcagggcccct

SEQ ID NO: 38351 - DNA, 15 bp, Homo sapiens
cctgcagggcccctt

SEQ ID NO: 38352 - DNA, 15 bp, Homo sapiens
ctgcagggccccttg

SEQ ID NO: 38353 - DNA, 15 bp, Homo sapiens
tgcagggccccttgt

SEQ ID NO: 38354 - DNA, 15 bp, Homo sapiens
gcagggccccttgtt

SEQ ID NO: 38355 - DNA, 15 bp, Homo sapiens
cagggccccttgttc

SEQ ID NO: 38356 - DNA, 15 bp, Homo sapiens
agggccccttgttca

SEQ ID NO: 38357 - DNA, 15 bp, Homo sapiens
gggccccttgttcag

SEQ ID NO: 38358 - DNA, 15 bp, Homo sapiens
ggccccttgttcaga

SEQ ID NO: 38359 - DNA, 15 bp, Homo sapiens
gccccttgttcagat

SEQ ID NO: 38360 - DNA, 15 bp, Homo sapiens
ccccttgttcagatt

SEQ ID NO: 38361 - DNA, 15 bp, Homo sapiens
cccttgttcagattt

SEQ ID NO: 38362 - DNA, 15 bp, Homo sapiens
ccttgttcagatttc

SEQ ID NO: 38363 - DNA, 15 bp, Homo sapiens
cttgttcagatttca

SEQ ID NO: 38364 - DNA, 15 bp, Homo sapiens
ttgttcagatttcaa

SEQ ID NO: 38365 - DNA, 15 bp, Homo sapiens
tgttcagatttcaag

SEQ ID NO: 38366 - DNA, 15 bp, Homo sapiens
gttcagatttcaaga

SEQ ID NO: 38367 - DNA, 15 bp, Homo sapiens
ttcagatttcaagat

SEQ ID NO: 38368 - DNA, 15 bp, Homo sapiens
tcagatttcaagatg

SEQ ID NO: 38369 - DNA, 15 bp, Homo sapiens
cagatttcaagatgg

SEQ ID NO: 38370 - DNA, 15 bp, Homo sapiens
agatttcaagatggc

SEQ ID NO: 38371 - DNA, 15 bp, Homo sapiens
gatttcaagatggcg

SEQ ID NO: 38372 - DNA, 15 bp, Homo sapiens
atttcaagatggcga

SEQ ID NO: 38373 - DNA, 15 bp, Homo sapiens
tttcaagatggcgac

SEQ ID NO: 38374 - DNA, 15 bp, Homo sapiens
ttcaagatggcgacc

SEQ ID NO: 38375 - DNA, 15 bp, Homo sapiens
tcaagatggcgacca

SEQ ID NO: 38376 - DNA, 15 bp, Homo sapiens
caagatggcgaccac

SEQ ID NO: 38377 - DNA, 15 bp, Homo sapiens
aagatggcgaccaca

SEQ ID NO: 38378 - DNA, 15 bp, Homo sapiens
agatggcgaccacag

SEQ ID NO: 38379 - DNA, 15 bp, Homo sapiens
gatggcgaccacaga

SEQ ID NO: 38380 - DNA, 15 bp, Homo sapiens
atggcgaccacagag

SEQ ID NO: 38381 - DNA, 15 bp, Homo sapiens
tggcgaccacagagc

SEQ ID NO: 38382 - DNA, 15 bp, Homo sapiens
ggcgaccacagagca

SEQ ID NO: 38383 - DNA, 15 bp, Homo sapiens
gcgaccacagagcat

SEQ ID NO: 38384 - DNA, 15 bp, Homo sapiens
cgaccacagagcatt

SEQ ID NO: 38385 - DNA, 15 bp, Homo sapiens
gaccacagagcatta

SEQ ID NO: 38386 - DNA, 15 bp, Homo sapiens
accacagagcattaa

SEQ ID NO: 38387 - DNA, 15 bp, Homo sapiens
ccacagagcattaaa

SEQ ID NO: 38388 - DNA, 15 bp, Homo sapiens
cacagagcattaaac

SEQ ID NO: 38389 - DNA, 15 bp, Homo sapiens
acagagcattaaaca

SEQ ID NO: 38390 - DNA, 15 bp, Homo sapiens
cagagcattaaacaa

SEQ ID NO: 38391 - DNA, 15 bp, Homo sapiens
agagcattaaacaaa

SEQ ID NO: 38392 - DNA, 15 bp, Homo sapiens
gagcattaaacaaag

SEQ ID NO: 38393 - DNA, 15 bp, Homo sapiens
agcattaaacaaagc

SEQ ID NO: 38394 - DNA, 15 bp, Homo sapiens
gcattaaacaaagca

SEQ ID NO: 38395 - DNA, 15 bp, Homo sapiens
cattaaacaaagcac

SEQ ID NO: 38396 - DNA, 15 bp, Homo sapiens
attaaacaaagcaca

SEQ ID NO: 38397 - DNA, 15 bp, Homo sapiens
ttaaacaaagcacag

SEQ ID NO: 38398 - DNA, 15 bp, Homo sapiens
taaacaaagcacagg

SEQ ID NO: 38399 - DNA, 15 bp, Homo sapiens
aaacaaagcacaggg

SEQ ID NO: 38400 - DNA, 15 bp, Homo sapiens
aacaaagcacagggt

SEQ ID NO: 38401 - DNA, 15 bp, Homo sapiens
acaaagcacagggtg

SEQ ID NO: 38402 - DNA, 15 bp, Homo sapiens
caaagcacagggtgc

SEQ ID NO: 38403 - DNA, 15 bp, Homo sapiens
aaagcacagggtgcc

SEQ ID NO: 38404 - DNA, 15 bp, Homo sapiens
aagcacagggtgcca

SEQ ID NO: 38405 - DNA, 15 bp, Homo sapiens
agcacagggtgccac

SEQ ID NO: 38406 - DNA, 15 bp, Homo sapiens
gcacagggtgccaca

SEQ ID NO: 38407 - DNA, 15 bp, Homo sapiens
cacagggtgccacat

SEQ ID NO: 38408 - DNA, 15 bp, Homo sapiens
acagggtgccacata

SEQ ID NO: 38409 - DNA, 15 bp, Homo sapiens
cagggtgccacataa

SEQ ID NO: 38410 - DNA, 15 bp, Homo sapiens
agggtgccacataac

SEQ ID NO: 38411 - DNA, 15 bp, Homo sapiens
gggtgccacataacc

SEQ ID NO: 38412 - DNA, 15 bp, Homo sapiens
ggtgccacataacca

SEQ ID NO: 38413 - DNA, 15 bp, Homo sapiens
gtgccacataaccac

SEQ ID NO: 38414 - DNA, 15 bp, Homo sapiens
tgccacataaccaca

SEQ ID NO: 38415 - DNA, 15 bp, Homo sapiens
gccacataaccacat

SEQ ID NO: 38416 - DNA, 15 bp, Homo sapiens
ccacataaccacata

SEQ ID NO: 38417 - DNA, 15 bp, Homo sapiens
cacataaccacatag

SEQ ID NO: 38418 - DNA, 15 bp, Homo sapiens
acataaccacatagg

SEQ ID NO: 38419 - DNA, 15 bp, Homo sapiens
cataaccacataggt

SEQ ID NO: 38420 - DNA, 15 bp, Homo sapiens
ataaccacataggtc

SEQ ID NO: 38421 - DNA, 15 bp, Homo sapiens
taaccacataggtca

SEQ ID NO: 38422 - DNA, 15 bp, Homo sapiens
aaccacataggtcac

SEQ ID NO: 38423 - DNA, 15 bp, Homo sapiens
accacataggtcaca

SEQ ID NO: 38424 - DNA, 15 bp, Homo sapiens
ccacataggtcacac

SEQ ID NO: 38425 - DNA, 15 bp, Homo sapiens
cacataggtcacacg

SEQ ID NO: 38426 - DNA, 15 bp, Homo sapiens
acataggtcacacgc

SEQ ID NO: 38427 - DNA, 15 bp, Homo sapiens
cataggtcacacgcc

SEQ ID NO: 38428 - DNA, 15 bp, Homo sapiens
ataggtcacacgccc

SEQ ID NO: 38429 - DNA, 15 bp, Homo sapiens
taggtcacacgccca

SEQ ID NO: 38430 - DNA, 15 bp, Homo sapiens
aggtcacacgcccat

SEQ ID NO: 38431 - DNA, 15 bp, Homo sapiens
ggtcacacgcccatg

SEQ ID NO: 38432 - DNA, 15 bp, Homo sapiens
gtcacacgcccatga

SEQ ID NO: 38433 - DNA, 15 bp, Homo sapiens
tcacacgcccatgaa

SEQ ID NO: 38434 - DNA, 15 bp, Homo sapiens
cacacgcccatgaag

SEQ ID NO: 38435 - DNA, 15 bp, Homo sapiens
acacgcccatgaagc

SEQ ID NO: 38436 - DNA, 15 bp, Homo sapiens
cacgcccatgaagcc

SEQ ID NO: 38437 - DNA, 15 bp, Homo sapiens
acgcccatgaagcca

SEQ ID NO: 38438 - DNA, 15 bp, Homo sapiens
cgcccatgaagccag

SEQ ID NO: 38439 - DNA, 15 bp, Homo sapiens
gcccatgaagccagc

SEQ ID NO: 38440 - DNA, 15 bp, Homo sapiens
cccatgaagccagcc

SEQ ID NO: 38441 - DNA, 15 bp, Homo sapiens
ccatgaagccagccc

SEQ ID NO: 38442 - DNA, 15 bp, Homo sapiens
catgaagccagccct

SEQ ID NO: 38443 - DNA, 15 bp, Homo sapiens
atgaagccagccctg

SEQ ID NO: 38444 - DNA, 15 bp, Homo sapiens
tgaagccagccctgg

SEQ ID NO: 38445 - DNA, 15 bp, Homo sapiens
gaagccagccctgga

SEQ ID NO: 38446 - DNA, 15 bp, Homo sapiens
aagccagccctggag

SEQ ID NO: 38447 - DNA, 15 bp, Homo sapiens
agccagccctggagg

SEQ ID NO: 38448 - DNA, 15 bp, Homo sapiens
gccagccctggaggc

SEQ ID NO: 38449 - DNA, 15 bp, Homo sapiens
ccagccctggaggcc

SEQ ID NO: 38450 - DNA, 15 bp, Homo sapiens
cagccctggaggcca

SEQ ID NO: 38451 - DNA, 15 bp, Homo sapiens
agccctggaggccag

SEQ ID NO: 38452 - DNA, 15 bp, Homo sapiens
gccctggaggccagg

SEQ ID NO: 38453 - DNA, 15 bp, Homo sapiens
ccctggaggccaggc

SEQ ID NO: 38454 - DNA, 15 bp, Homo sapiens
cctggaggccaggca

SEQ ID NO: 38455 - DNA, 15 bp, Homo sapiens
ctggaggccaggcac

SEQ ID NO: 38456 - DNA, 15 bp, Homo sapiens
tggaggccaggcact

SEQ ID NO: 38457 - DNA, 15 bp, Homo sapiens
ggaggccaggcactg

SEQ ID NO: 38458 - DNA, 15 bp, Homo sapiens
gaggccaggcactgt

SEQ ID NO: 38459 - DNA, 15 bp, Homo sapiens
aggccaggcactgtt

SEQ ID NO: 38460 - DNA, 15 bp, Homo sapiens
ggccaggcactgttt

SEQ ID NO: 38461 - DNA, 15 bp, Homo sapiens
gccaggcactgtttc

SEQ ID NO: 38462 - DNA, 15 bp, Homo sapiens
ccaggcactgtttct

SEQ ID NO: 38463 - DNA, 15 bp, Homo sapiens
caggcactgtttctg

SEQ ID NO: 38464 - DNA, 15 bp, Homo sapiens
aggcactgtttctga

SEQ ID NO: 38465 - DNA, 15 bp, Homo sapiens
ggcactgtttctgag

SEQ ID NO: 38466 - DNA, 15 bp, Homo sapiens
gcactgtttctgagc

SEQ ID NO: 38467 - DNA, 15 bp, Homo sapiens
cactgtttctgagcg

SEQ ID NO: 38468 - DNA, 15 bp, Homo sapiens
actgtttctgagcgc

SEQ ID NO: 38469 - DNA, 15 bp, Homo sapiens
ctgtttctgagcgct

SEQ ID NO: 38470 - DNA, 15 bp, Homo sapiens
tgtttctgagcgctt

SEQ ID NO: 38471 - DNA, 15 bp, Homo sapiens
gtttctgagcgcttt

SEQ ID NO: 38472 - DNA, 15 bp, Homo sapiens
tttctgagcgctttg

SEQ ID NO: 38473 - DNA, 15 bp, Homo sapiens
ttctgagcgctttgc

SEQ ID NO: 38474 - DNA, 15 bp, Homo sapiens
tctgagcgctttgct

SEQ ID NO: 38475 - DNA, 15 bp, Homo sapiens
ctgagcgctttgctg

SEQ ID NO: 38476 - DNA, 15 bp, Homo sapiens
tgagcgctttgctgg

SEQ ID NO: 38477 - DNA, 15 bp, Homo sapiens
gagcgctttgctggt

SEQ ID NO: 38478 - DNA, 15 bp, Homo sapiens
agcgctttgctggtg

SEQ ID NO: 38479 - DNA, 15 bp, Homo sapiens
gcgctttgctggtgg

SEQ ID NO: 38480 - DNA, 15 bp, Homo sapiens
cgctttgctggtggt

SEQ ID NO: 38481 - DNA, 15 bp, Homo sapiens
gctttgctggtggta

SEQ ID NO: 38482 - DNA, 15 bp, Homo sapiens
ctttgctggtggtaa

SEQ ID NO: 38483 - DNA, 15 bp, Homo sapiens
tttgctggtggtaat

SEQ ID NO: 38484 - DNA, 15 bp, Homo sapiens
ttgctggtggtaatt

SEQ ID NO: 38485 - DNA, 15 bp, Homo sapiens
tgctggtggtaattt

SEQ ID NO: 38486 - DNA, 15 bp, Homo sapiens
gctggtggtaattta

SEQ ID NO: 38487 - DNA, 15 bp, Homo sapiens
ctggtggtaatttat

SEQ ID NO: 38488 - DNA, 15 bp, Homo sapiens
tggtggtaatttatt

SEQ ID NO: 38489 - DNA, 15 bp, Homo sapiens
ggtggtaatttattt

SEQ ID NO: 38490 - DNA, 15 bp, Homo sapiens
gtggtaatttatttc

SEQ ID NO: 38491 - DNA, 15 bp, Homo sapiens
tggtaatttatttct

SEQ ID NO: 38492 - DNA, 15 bp, Homo sapiens
ggtaatttatttctc

SEQ ID NO: 38493 - DNA, 15 bp, Homo sapiens
gtaatttatttctca

SEQ ID NO: 38494 - DNA, 15 bp, Homo sapiens
taatttatttctcat

SEQ ID NO: 38495 - DNA, 15 bp, Homo sapiens
aatttatttctcatg

SEQ ID NO: 38496 - DNA, 15 bp, Homo sapiens
atttatttctcatga

SEQ ID NO: 38497 - DNA, 15 bp, Homo sapiens
tttatttctcatgat

SEQ ID NO: 38498 - DNA, 15 bp, Homo sapiens
ttatttctcatgatg

SEQ ID NO: 38499 - DNA, 15 bp, Homo sapiens
tatttctcatgatgc

SEQ ID NO: 38500 - DNA, 15 bp, Homo sapiens
atttctcatgatgcg

SEQ ID NO: 38501 - DNA, 15 bp, Homo sapiens
tttctcatgatgcga

SEQ ID NO: 38502 - DNA, 15 bp, Homo sapiens
ttctcatgatgcgaa

SEQ ID NO: 38503 - DNA, 15 bp, Homo sapiens
tctcatgatgcgaat

SEQ ID NO: 38504 - DNA, 15 bp, Homo sapiens
ctcatgatgcgaatg

SEQ ID NO: 38505 - DNA, 15 bp, Homo sapiens
tcatgatgcgaatgt

SEQ ID NO: 38506 - DNA, 15 bp, Homo sapiens
catgatgcgaatgta

SEQ ID NO: 38507 - DNA, 15 bp, Homo sapiens
atgatgcgaatgtac

SEQ ID NO: 38508 - DNA, 15 bp, Homo sapiens
tgatgcgaatgtaca

SEQ ID NO: 38509 - DNA, 15 bp, Homo sapiens
gatgcgaatgtacag

SEQ ID NO: 38510 - DNA, 15 bp, Homo sapiens
atgcgaatgtacaga

SEQ ID NO: 38511 - DNA, 15 bp, Homo sapiens
tgcgaatgtacagat

SEQ ID NO: 38512 - DNA, 15 bp, Homo sapiens
gcgaatgtacagatg

SEQ ID NO: 38513 - DNA, 15 bp, Homo sapiens
cgaatgtacagatga

SEQ ID NO: 38514 - DNA, 15 bp, Homo sapiens
gaatgtacagatgag

SEQ ID NO: 38515 - DNA, 15 bp, Homo sapiens
aatgtacagatgagg

SEQ ID NO: 38516 - DNA, 15 bp, Homo sapiens
atgtacagatgagga

SEQ ID NO: 38517 - DNA, 15 bp, Homo sapiens
tgtacagatgaggaa

SEQ ID NO: 38518 - DNA, 15 bp, Homo sapiens
gtacagatgaggaat

SEQ ID NO: 38519 - DNA, 15 bp, Homo sapiens
tacagatgaggaata

SEQ ID NO: 38520 - DNA, 15 bp, Homo sapiens
acagatgaggaatat

SEQ ID NO: 38521 - DNA, 15 bp, Homo sapiens
cagatgaggaatatt

SEQ ID NO: 38522 - DNA, 15 bp, Homo sapiens
agatgaggaatattg

SEQ ID NO: 38523 - DNA, 15 bp, Homo sapiens
gatgaggaatattga

SEQ ID NO: 38524 - DNA, 15 bp, Homo sapiens
atgaggaatattgag

SEQ ID NO: 38525 - DNA, 15 bp, Homo sapiens
tgaggaatattgagg

SEQ ID NO: 38526 - DNA, 15 bp, Homo sapiens
gaggaatattgaggc

SEQ ID NO: 38527 - DNA, 15 bp, Homo sapiens
aggaatattgaggcc

SEQ ID NO: 38528 - DNA, 15 bp, Homo sapiens
ggaatattgaggcca

SEQ ID NO: 38529 - DNA, 15 bp, Homo sapiens
gaatattgaggccag

SEQ ID NO: 38530 - DNA, 15 bp, Homo sapiens
aatattgaggccagg

SEQ ID NO: 38531 - DNA, 15 bp, Homo sapiens
atattgaggccaggg

SEQ ID NO: 38532 - DNA, 15 bp, Homo sapiens
tattgaggccagggg

SEQ ID NO: 38533 - DNA, 15 bp, Homo sapiens
attgaggccaggggg

SEQ ID NO: 38534 - DNA, 15 bp, Homo sapiens
ttgaggccagggggg

SEQ ID NO: 38535 - DNA, 15 bp, Homo sapiens
tgaggccaggggggt

SEQ ID NO: 38536 - DNA, 15 bp, Homo sapiens
gaggccaggggggtt

SEQ ID NO: 38537 - DNA, 15 bp, Homo sapiens
aggccaggggggttt

SEQ ID NO: 38538 - DNA, 15 bp, Homo sapiens
ggccaggggggttta

SEQ ID NO: 38539 - DNA, 15 bp, Homo sapiens
gccaggggggtttag

SEQ ID NO: 38540 - DNA, 15 bp, Homo sapiens
ccaggggggtttagg

SEQ ID NO: 38541 - DNA, 15 bp, Homo sapiens
caggggggtttaggt

SEQ ID NO: 38542 - DNA, 15 bp, Homo sapiens
aggggggtttaggtg

SEQ ID NO: 38543 - DNA, 15 bp, Homo sapiens
ggggggtttaggtga

SEQ ID NO: 38544 - DNA, 15 bp, Homo sapiens
gggggtttaggtgac

SEQ ID NO: 38545 - DNA, 15 bp, Homo sapiens
ggggtttaggtgact

SEQ ID NO: 38546 - DNA, 15 bp, Homo sapiens
gggtttaggtgactt

SEQ ID NO: 38547 - DNA, 15 bp, Homo sapiens
ggtttaggtgacttt

SEQ ID NO: 38548 - DNA, 15 bp, Homo sapiens
gtttaggtgactttc

SEQ ID NO: 38549 - DNA, 15 bp, Homo sapiens
tttaggtgactttcc

SEQ ID NO: 38550 - DNA, 15 bp, Homo sapiens
ttaggtgactttccc

SEQ ID NO: 38551 - DNA, 15 bp, Homo sapiens
taggtgactttccca

SEQ ID NO: 38552 - DNA, 15 bp, Homo sapiens
aggtgactttcccaa

SEQ ID NO: 38553 - DNA, 15 bp, Homo sapiens
ggtgactttcccaag

SEQ ID NO: 38554 - DNA, 15 bp, Homo sapiens
gtgactttcccaagg

SEQ ID NO: 38555 - DNA, 15 bp, Homo sapiens
tgactttcccaaggt

SEQ ID NO: 38556 - DNA, 15 bp, Homo sapiens
gactttcccaaggtc

SEQ ID NO: 38557 - DNA, 15 bp, Homo sapiens
actttcccaaggtca

SEQ ID NO: 38558 - DNA, 15 bp, Homo sapiens
ctttcccaaggtcac

SEQ ID NO: 38559 - DNA, 15 bp, Homo sapiens
tttcccaaggtcaca

SEQ ID NO: 38560 - DNA, 15 bp, Homo sapiens
ttcccaaggtcacag

SEQ ID NO: 38561 - DNA, 15 bp, Homo sapiens
tcccaaggtcacagt

SEQ ID NO: 38562 - DNA, 15 bp, Homo sapiens
cccaaggtcacagtt

SEQ ID NO: 38563 - DNA, 15 bp, Homo sapiens
ccaaggtcacagttg

SEQ ID NO: 38564 - DNA, 15 bp, Homo sapiens
caaggtcacagttgg

SEQ ID NO: 38565 - DNA, 15 bp, Homo sapiens
aaggtcacagttggg

SEQ ID NO: 38566 - DNA, 15 bp, Homo sapiens
aggtcacagttgggt

SEQ ID NO: 38567 - DNA, 15 bp, Homo sapiens
ggtcacagttgggtg

SEQ ID NO: 38568 - DNA, 15 bp, Homo sapiens
gtcacagttgggtgg

SEQ ID NO: 38569 - DNA, 15 bp, Homo sapiens
tcacagttgggtggt

SEQ ID NO: 38570 - DNA, 15 bp, Homo sapiens
cacagttgggtggta

SEQ ID NO: 38571 - DNA, 15 bp, Homo sapiens
acagttgggtggtaa

SEQ ID NO: 38572 - DNA, 15 bp, Homo sapiens
cagttgggtggtaaa

SEQ ID NO: 38573 - DNA, 15 bp, Homo sapiens
agttgggtggtaaag

SEQ ID NO: 38574 - DNA, 15 bp, Homo sapiens
gttgggtggtaaaga

SEQ ID NO: 38575 - DNA, 15 bp, Homo sapiens
ttgggtggtaaagag

SEQ ID NO: 38576 - DNA, 15 bp, Homo sapiens
tgggtggtaaagagc

SEQ ID NO: 38577 - DNA, 15 bp, Homo sapiens
gggtggtaaagagcc

SEQ ID NO: 38578 - DNA, 15 bp, Homo sapiens
ggtggtaaagagccc

SEQ ID NO: 38579 - DNA, 15 bp, Homo sapiens
gtggtaaagagccct

SEQ ID NO: 38580 - DNA, 15 bp, Homo sapiens
tggtaaagagcccta

SEQ ID NO: 38581 - DNA, 15 bp, Homo sapiens
ggtaaagagccctat

SEQ ID NO: 38582 - DNA, 15 bp, Homo sapiens
gtaaagagccctatt

SEQ ID NO: 38583 - DNA, 15 bp, Homo sapiens
taaagagccctattc

SEQ ID NO: 38584 - DNA, 15 bp, Homo sapiens
aaagagccctattca

SEQ ID NO: 38585 - DNA, 15 bp, Homo sapiens
aagagccctattcaa

SEQ ID NO: 38586 - DNA, 15 bp, Homo sapiens
agagccctattcaac

SEQ ID NO: 38587 - DNA, 15 bp, Homo sapiens
gagccctattcaacc

SEQ ID NO: 38588 - DNA, 15 bp, Homo sapiens
agccctattcaaccc

SEQ ID NO: 38589 - DNA, 15 bp, Homo sapiens
gccctattcaacccc

SEQ ID NO: 38590 - DNA, 15 bp, Homo sapiens
ccctattcaacccca

SEQ ID NO: 38591 - DNA, 15 bp, Homo sapiens
cctattcaaccccag

SEQ ID NO: 38592 - DNA, 15 bp, Homo sapiens
ctattcaaccccagt

SEQ ID NO: 38593 - DNA, 15 bp, Homo sapiens
tattcaaccccagtt

SEQ ID NO: 38594 - DNA, 15 bp, Homo sapiens
attcaaccccagttc

SEQ ID NO: 38595 - DNA, 15 bp, Homo sapiens
ttcaaccccagttca

SEQ ID NO: 38596 - DNA, 15 bp, Homo sapiens
tcaaccccagttcat

SEQ ID NO: 38597 - DNA, 15 bp, Homo sapiens
caaccccagttcatg

SEQ ID NO: 38598 - DNA, 15 bp, Homo sapiens
aaccccagttcatgg

SEQ ID NO: 38599 - DNA, 15 bp, Homo sapiens
accccagttcatggt

SEQ ID NO: 38600 - DNA, 15 bp, Homo sapiens
ccccagttcatggtc

SEQ ID NO: 38601 - DNA, 15 bp, Homo sapiens
cccagttcatggtcc

SEQ ID NO: 38602 - DNA, 15 bp, Homo sapiens
ccagttcatggtccc

SEQ ID NO: 38603 - DNA, 15 bp, Homo sapiens
cagttcatggtccca

SEQ ID NO: 38604 - DNA, 15 bp, Homo sapiens
agttcatggtcccag

SEQ ID NO: 38605 - DNA, 15 bp, Homo sapiens
gttcatggtcccagc

SEQ ID NO: 38606 - DNA, 15 bp, Homo sapiens
ttcatggtcccagca

SEQ ID NO: 38607 - DNA, 15 bp, Homo sapiens
tcatggtcccagcat

SEQ ID NO: 38608 - DNA, 15 bp, Homo sapiens
catggtcccagcatc

SEQ ID NO: 38609 - DNA, 15 bp, Homo sapiens
atggtcccagcatca

SEQ ID NO: 38610 - DNA, 15 bp, Homo sapiens
tggtcccagcatcag

SEQ ID NO: 38611 - DNA, 15 bp, Homo sapiens
ggtcccagcatcagt

SEQ ID NO: 38612 - DNA, 15 bp, Homo sapiens
gtcccagcatcagtg

SEQ ID NO: 38613 - DNA, 15 bp, Homo sapiens
tcccagcatcagtgg

SEQ ID NO: 38614 - DNA, 15 bp, Homo sapiens
cccagcatcagtggc

SEQ ID NO: 38615 - DNA, 15 bp, Homo sapiens
ccagcatcagtggcc

SEQ ID NO: 38616 - DNA, 15 bp, Homo sapiens
cagcatcagtggcca

SEQ ID NO: 38617 - DNA, 15 bp, Homo sapiens
agcatcagtggccac

SEQ ID NO: 38618 - DNA, 15 bp, Homo sapiens
gcatcagtggccaca

SEQ ID NO: 38619 - DNA, 15 bp, Homo sapiens
catcagtggccacat

SEQ ID NO: 38620 - DNA, 15 bp, Homo sapiens
atcagtggccacata

SEQ ID NO: 38621 - DNA, 15 bp, Homo sapiens
tcagtggccacatac

SEQ ID NO: 38622 - DNA, 15 bp, Homo sapiens
cagtggccacatacg

SEQ ID NO: 38623 - DNA, 15 bp, Homo sapiens
agtggccacatacga

SEQ ID NO: 38624 - DNA, 15 bp, Homo sapiens
gtggccacatacgac

SEQ ID NO: 38625 - DNA, 15 bp, Homo sapiens
tggccacatacgaca

SEQ ID NO: 38626 - DNA, 15 bp, Homo sapiens
ggccacatacgacat

SEQ ID NO: 38627 - DNA, 15 bp, Homo sapiens
gccacatacgacatc

SEQ ID NO: 38628 - DNA, 15 bp, Homo sapiens
ccacatacgacatcc

SEQ ID NO: 38629 - DNA, 15 bp, Homo sapiens
cacatacgacatccg

SEQ ID NO: 38630 - DNA, 15 bp, Homo sapiens
acatacgacatccgc

SEQ ID NO: 38631 - DNA, 15 bp, Homo sapiens
catacgacatccgca

SEQ ID NO: 38632 - DNA, 15 bp, Homo sapiens
atacgacatccgcac

SEQ ID NO: 38633 - DNA, 15 bp, Homo sapiens
tacgacatccgcacc

SEQ ID NO: 38634 - DNA, 15 bp, Homo sapiens
acgacatccgcacct

SEQ ID NO: 38635 - DNA, 15 bp, Homo sapiens
cgacatccgcacctg

SEQ ID NO: 38636 - DNA, 15 bp, Homo sapiens
gacatccgcacctgt

SEQ ID NO: 38637 - DNA, 15 bp, Homo sapiens
acatccgcacctgtg

SEQ ID NO: 38638 - DNA, 15 bp, Homo sapiens
catccgcacctgtgc

SEQ ID NO: 38639 - DNA, 15 bp, Homo sapiens
atccgcacctgtgct

SEQ ID NO: 38640 - DNA, 15 bp, Homo sapiens
tccgcacctgtgctc

SEQ ID NO: 38641 - DNA, 15 bp, Homo sapiens
ccgcacctgtgctct

SEQ ID NO: 38642 - DNA, 15 bp, Homo sapiens
cgcacctgtgctcta

SEQ ID NO: 38643 - DNA, 15 bp, Homo sapiens
gcacctgtgctctaa

SEQ ID NO: 38644 - DNA, 15 bp, Homo sapiens
cacctgtgctctaat

SEQ ID NO: 38645 - DNA, 15 bp, Homo sapiens
acctgtgctctaata

SEQ ID NO: 38646 - DNA, 15 bp, Homo sapiens
cctgtgctctaataa

SEQ ID NO: 38647 - DNA, 15 bp, Homo sapiens
ctgtgctctaataaa

SEQ ID NO: 38648 - DNA, 15 bp, Homo sapiens
tgtgctctaataaat

SEQ ID NO: 38649 - DNA, 15 bp, Homo sapiens
gtgctctaataaata

SEQ ID NO: 38650 - DNA, 15 bp, Homo sapiens
tgctctaataaatac

SEQ ID NO: 38651 - DNA, 15 bp, Homo sapiens
gctctaataaatacg

SEQ ID NO: 38652 - DNA, 15 bp, Homo sapiens
ctctaataaatacgg

SEQ ID NO: 38653 - DNA, 15 bp, Homo sapiens
tctaataaatacggc

SEQ ID NO: 38654 - DNA, 15 bp, Homo sapiens
ctaataaatacggct

SEQ ID NO: 38655 - DNA, 15 bp, Homo sapiens
taataaatacggctc

SEQ ID NO: 38656 - DNA, 15 bp, Homo sapiens
aataaatacggctca

SEQ ID NO: 38657 - DNA, 15 bp, Homo sapiens
ataaatacggctcat

SEQ ID NO: 38658 - DNA, 15 bp, Homo sapiens
taaatacggctcatg

SEQ ID NO: 38659 - DNA, 15 bp, Homo sapiens
aaatacggctcatgc

SEQ ID NO: 38660 - DNA, 15 bp, Homo sapiens
aatacggctcatgct

SEQ ID NO: 38661 - DNA, 15 bp, Homo sapiens
atacggctcatgctg

SEQ ID NO: 38662 - DNA, 15 bp, Homo sapiens
tacggctcatgctgt

SEQ ID NO: 38663 - DNA, 15 bp, Homo sapiens
acggctcatgctgtt

SEQ ID NO: 38664 - DNA, 15 bp, Homo sapiens
cggctcatgctgttt

SEQ ID NO: 38665 - DNA, 15 bp, Homo sapiens
ggctcatgctgtttt

SEQ ID NO: 38666 - DNA, 15 bp, Homo sapiens
gctcatgctgttttg

SEQ ID NO: 38667 - DNA, 15 bp, Homo sapiens
ctcatgctgttttgt

SEQ ID NO: 38668 - DNA, 15 bp, Homo sapiens
tcatgctgttttgtg

SEQ ID NO: 38669 - DNA, 15 bp, Homo sapiens
catgctgttttgtgg

SEQ ID NO: 38670 - DNA, 15 bp, Homo sapiens
atgctgttttgtggg

SEQ ID NO: 38671 - DNA, 15 bp, Homo sapiens
tgctgttttgtggga

SEQ ID NO: 38672 - DNA, 15 bp, Homo sapiens
gctgttttgtgggat

SEQ ID NO: 38673 - DNA, 15 bp, Homo sapiens
ctgttttgtgggatt

SEQ ID NO: 38674 - DNA, 15 bp, Homo sapiens
tgttttgtgggattc

SEQ ID NO: 38675 - DNA, 15 bp, Homo sapiens
gttttgtgggattcc

SEQ ID NO: 38676 - DNA, 15 bp, Homo sapiens
ttttgtgggattcca

SEQ ID NO: 38677 - DNA, 15 bp, Homo sapiens
tttgtgggattccac

SEQ ID NO: 38678 - DNA, 15 bp, Homo sapiens
ttgtgggattccacc

SEQ ID NO: 38679 - DNA, 15 bp, Homo sapiens
tgtgggattccacct

SEQ ID NO: 38680 - DNA, 15 bp, Homo sapiens
gtgggattccacctc

SEQ ID NO: 38681 - DNA, 15 bp, Homo sapiens
tgggattccacctca

SEQ ID NO: 38682 - DNA, 15 bp, Homo sapiens
gggattccacctcag

SEQ ID NO: 38683 - DNA, 15 bp, Homo sapiens
ggattccacctcaga

SEQ ID NO: 38684 - DNA, 15 bp, Homo sapiens
gattccacctcagac

SEQ ID NO: 38685 - DNA, 15 bp, Homo sapiens
attccacctcagact

SEQ ID NO: 38686 - DNA, 15 bp, Homo sapiens
ttccacctcagactg

SEQ ID NO: 38687 - DNA, 15 bp, Homo sapiens
tccacctcagactgg

SEQ ID NO: 38688 - DNA, 15 bp, Homo sapiens
ccacctcagactgga

SEQ ID NO: 38689 - DNA, 15 bp, Homo sapiens
cacctcagactggaa

SEQ ID NO: 38690 - DNA, 15 bp, Homo sapiens
acctcagactggaat

SEQ ID NO: 38691 - DNA, 15 bp, Homo sapiens
cctcagactggaatt

SEQ ID NO: 38692 - DNA, 15 bp, Homo sapiens
ctcagactggaattt

SEQ ID NO: 38693 - DNA, 15 bp, Homo sapiens
tcagactggaattta

SEQ ID NO: 38694 - DNA, 15 bp, Homo sapiens
cagactggaatttag

SEQ ID NO: 38695 - DNA, 15 bp, Homo sapiens
agactggaatttaga

SEQ ID NO: 38696 - DNA, 15 bp, Homo sapiens
gactggaatttagaa

SEQ ID NO: 38697 - DNA, 15 bp, Homo sapiens
actggaatttagaag

SEQ ID NO: 38698 - DNA, 15 bp, Homo sapiens
ctggaatttagaaga

SEQ ID NO: 38699 - DNA, 15 bp, Homo sapiens
tggaatttagaagag

SEQ ID NO: 38700 - DNA, 15 bp, Homo sapiens
ggaatttagaagagg

SEQ ID NO: 38701 - DNA, 15 bp, Homo sapiens
gaatttagaagaggg

SEQ ID NO: 38702 - DNA, 15 bp, Homo sapiens
aatttagaagagggc

SEQ ID NO: 38703 - DNA, 15 bp, Homo sapiens
atttagaagagggcg

SEQ ID NO: 38704 - DNA, 15 bp, Homo sapiens
tttagaagagggcgt

SEQ ID NO: 38705 - DNA, 15 bp, Homo sapiens
ttagaagagggcgtc

SEQ ID NO: 38706 - DNA, 15 bp, Homo sapiens
tagaagagggcgtcc

SEQ ID NO: 38707 - DNA, 15 bp, Homo sapiens
agaagagggcgtcct

SEQ ID NO: 38708 - DNA, 15 bp, Homo sapiens
gaagagggcgtcctt

SEQ ID NO: 38709 - DNA, 15 bp, Homo sapiens
aagagggcgtccttg

SEQ ID NO: 38710 - DNA, 15 bp, Homo sapiens
agagggcgtccttgc

SEQ ID NO: 38711 - DNA, 15 bp, Homo sapiens
gagggcgtccttgct

SEQ ID NO: 38712 - DNA, 15 bp, Homo sapiens
agggcgtccttgctt

SEQ ID NO: 38713 - DNA, 15 bp, Homo sapiens
gggcgtccttgcttt

SEQ ID NO: 38714 - DNA, 15 bp, Homo sapiens
ggcgtccttgctttg

SEQ ID NO: 38715 - DNA, 15 bp, Homo sapiens
gcgtccttgctttga

SEQ ID NO: 38716 - DNA, 15 bp, Homo sapiens
cgtccttgctttgaa

SEQ ID NO: 38717 - DNA, 15 bp, Homo sapiens
gtccttgctttgaaa

SEQ ID NO: 38718 - DNA, 15 bp, Homo sapiens
tccttgctttgaaaa

SEQ ID NO: 38719 - DNA, 15 bp, Homo sapiens
ccttgctttgaaaaa

SEQ ID NO: 38720 - DNA, 15 bp, Homo sapiens
cttgctttgaaaaac

SEQ ID NO: 38721 - DNA, 15 bp, Homo sapiens
ttgctttgaaaaaca

SEQ ID NO: 38722 - DNA, 15 bp, Homo sapiens
tgctttgaaaaacac

SEQ ID NO: 38723 - DNA, 15 bp, Homo sapiens
gctttgaaaaacact

SEQ ID NO: 38724 - DNA, 15 bp, Homo sapiens
ctttgaaaaacactg

SEQ ID NO: 38725 - DNA, 15 bp, Homo sapiens
tttgaaaaacactga

SEQ ID NO: 38726 - DNA, 15 bp, Homo sapiens
ttgaaaaacactgat

SEQ ID NO: 38727 - DNA, 15 bp, Homo sapiens
tgaaaaacactgatt

SEQ ID NO: 38728 - DNA, 15 bp, Homo sapiens
gaaaaacactgattt

SEQ ID NO: 38729 - DNA, 15 bp, Homo sapiens
aaaaacactgattta

SEQ ID NO: 38730 - DNA, 15 bp, Homo sapiens
aaaacactgatttaa

SEQ ID NO: 38731 - DNA, 15 bp, Homo sapiens
aaacactgatttaaa

SEQ ID NO: 38732 - DNA, 15 bp, Homo sapiens
aacactgatttaaaa

SEQ ID NO: 38733 - DNA, 15 bp, Homo sapiens
acactgatttaaaaa

SEQ ID NO: 38734 - DNA, 15 bp, Homo sapiens
cactgatttaaaaat

SEQ ID NO: 38735 - DNA, 15 bp, Homo sapiens
actgatttaaaaata

SEQ ID NO: 38736 - DNA, 15 bp, Homo sapiens
ctgatttaaaaataa

SEQ ID NO: 38737 - DNA, 15 bp, Homo sapiens
tgatttaaaaataaa

SEQ ID NO: 38738 - DNA, 15 bp, Homo sapiens
gatttaaaaataaag

SEQ ID NO: 38739 - DNA, 15 bp, Homo sapiens
atttaaaaataaagt

SEQ ID NO: 38740 - DNA, 15 bp, Homo sapiens
tttaaaaataaagtg

SEQ ID NO: 38741 - DNA, 15 bp, Homo sapiens
ttaaaaataaagtgg

SEQ ID NO: 38742 - DNA, 15 bp, Homo sapiens
taaaaataaagtgga

SEQ ID NO: 38743 - DNA, 15 bp, Homo sapiens
aaaaataaagtggag

SEQ ID NO: 38744 - DNA, 15 bp, Homo sapiens
aaaataaagtggagc

SEQ ID NO: 38745 - DNA, 15 bp, Homo sapiens
aaataaagtggagcc

SEQ ID NO: 38746 - DNA, 15 bp, Homo sapiens
aataaagtggagcca

SEQ ID NO: 38747 - DNA, 15 bp, Homo sapiens
ataaagtggagccag

SEQ ID NO: 38748 - DNA, 15 bp, Homo sapiens
taaagtggagccagg

SEQ ID NO: 38749 - DNA, 15 bp, Homo sapiens
aaagtggagccaggc

SEQ ID NO: 38750 - DNA, 15 bp, Homo sapiens
aagtggagccaggcg

SEQ ID NO: 38751 - DNA, 15 bp, Homo sapiens
agtggagccaggcgc

SEQ ID NO: 38752 - DNA, 15 bp, Homo sapiens
gtggagccaggcgca

SEQ ID NO: 38753 - DNA, 15 bp, Homo sapiens
tggagccaggcgcag

SEQ ID NO: 38754 - DNA, 15 bp, Homo sapiens
ggagccaggcgcagt

SEQ ID NO: 38755 - DNA, 15 bp, Homo sapiens
gagccaggcgcagtg

SEQ ID NO: 38756 - DNA, 15 bp, Homo sapiens
agccaggcgcagtgg

SEQ ID NO: 38757 - DNA, 15 bp, Homo sapiens
gccaggcgcagtggc

SEQ ID NO: 38758 - DNA, 15 bp, Homo sapiens
ccaggcgcagtggct

SEQ ID NO: 38759 - DNA, 15 bp, Homo sapiens
caggcgcagtggctc

SEQ ID NO: 38760 - DNA, 15 bp, Homo sapiens
aggcgcagtggctca

SEQ ID NO: 38761 - DNA, 15 bp, Homo sapiens
ggcgcagtggctcat

SEQ ID NO: 38762 - DNA, 15 bp, Homo sapiens
gcgcagtggctcatg

SEQ ID NO: 38763 - DNA, 15 bp, Homo sapiens
cgcagtggctcatgc

SEQ ID NO: 38764 - DNA, 15 bp, Homo sapiens
gcagtggctcatgcc

SEQ ID NO: 38765 - DNA, 15 bp, Homo sapiens
cagtggctcatgcct

SEQ ID NO: 38766 - DNA, 15 bp, Homo sapiens
agtggctcatgcctg

SEQ ID NO: 38767 - DNA, 15 bp, Homo sapiens
gtggctcatgcctgt

SEQ ID NO: 38768 - DNA, 15 bp, Homo sapiens
tggctcatgcctgta

SEQ ID NO: 38769 - DNA, 15 bp, Homo sapiens
ggctcatgcctgtaa

SEQ ID NO: 38770 - DNA, 15 bp, Homo sapiens
gctcatgcctgtaat

SEQ ID NO: 38771 - DNA, 15 bp, Homo sapiens
ctcatgcctgtaatc

SEQ ID NO: 38772 - DNA, 15 bp, Homo sapiens
tcatgcctgtaatcc

SEQ ID NO: 38773 - DNA, 15 bp, Homo sapiens
catgcctgtaatccc

SEQ ID NO: 38774 - DNA, 15 bp, Homo sapiens
atgcctgtaatccca

SEQ ID NO: 38775 - DNA, 15 bp, Homo sapiens
tgcctgtaatcccag

SEQ ID NO: 38776 - DNA, 15 bp, Homo sapiens
gcactttgggaggct

SEQ ID NO: 38777 - DNA, 15 bp, Homo sapiens
cactttgggaggctg

SEQ ID NO: 38778 - DNA, 15 bp, Homo sapiens
actttgggaggctga

SEQ ID NO: 38779 - DNA, 15 bp, Homo sapiens
ctttgggaggctgaa

SEQ ID NO: 38780 - DNA, 15 bp, Homo sapiens
tttgggaggctgaag

SEQ ID NO: 38781 - DNA, 15 bp, Homo sapiens
ttgggaggctgaagc

SEQ ID NO: 38782 - DNA, 15 bp, Homo sapiens
tgggaggctgaagcg

SEQ ID NO: 38783 - DNA, 15 bp, Homo sapiens
gggaggctgaagcgg

SEQ ID NO: 38784 - DNA, 15 bp, Homo sapiens
ggaggctgaagcggg

SEQ ID NO: 38785 - DNA, 15 bp, Homo sapiens
gaggctgaagcgggt

SEQ ID NO: 38786 - DNA, 15 bp, Homo sapiens
aggctgaagcgggtg

SEQ ID NO: 38787 - DNA, 15 bp, Homo sapiens
ggctgaagcgggtgg

SEQ ID NO: 38788 - DNA, 15 bp, Homo sapiens
gctgaagcgggtgga

SEQ ID NO: 38789 - DNA, 15 bp, Homo sapiens
ctgaagcgggtggat

SEQ ID NO: 38790 - DNA, 15 bp, Homo sapiens
tgaagcgggtggatc

SEQ ID NO: 38791 - DNA, 15 bp, Homo sapiens
gaagcgggtggatca

SEQ ID NO: 38792 - DNA, 15 bp, Homo sapiens
aagcgggtggatcac

SEQ ID NO: 38793 - DNA, 15 bp, Homo sapiens
agcgggtggatcaca

SEQ ID NO: 38794 - DNA, 15 bp, Homo sapiens
gcgggtggatcacat

SEQ ID NO: 38795 - DNA, 15 bp, Homo sapiens
cgggtggatcacatg

SEQ ID NO: 38796 - DNA, 15 bp, Homo sapiens
gggtggatcacatga

SEQ ID NO: 38797 - DNA, 15 bp, Homo sapiens
ggtggatcacatgag

SEQ ID NO: 38798 - DNA, 15 bp, Homo sapiens
gtggatcacatgagg

SEQ ID NO: 38799 - DNA, 15 bp, Homo sapiens
tggatcacatgaggt

SEQ ID NO: 38800 - DNA, 15 bp, Homo sapiens
ggatcacatgaggtc

SEQ ID NO: 38801 - DNA, 15 bp, Homo sapiens
gatcacatgaggtca

SEQ ID NO: 38802 - DNA, 15 bp, Homo sapiens
atcacatgaggtcag

SEQ ID NO: 38803 - DNA, 15 bp, Homo sapiens
tcacatgaggtcagg

SEQ ID NO: 38804 - DNA, 15 bp, Homo sapiens
cacatgaggtcagga

SEQ ID NO: 38805 - DNA, 15 bp, Homo sapiens
acatgaggtcaggag

SEQ ID NO: 38806 - DNA, 15 bp, Homo sapiens
catgaggtcaggagt

SEQ ID NO: 38807 - DNA, 15 bp, Homo sapiens
atgaggtcaggagtt

SEQ ID NO: 38808 - DNA, 15 bp, Homo sapiens
tgaggtcaggagttc

SEQ ID NO: 38809 - DNA, 15 bp, Homo sapiens
gaggtcaggagttcg

SEQ ID NO: 38810 - DNA, 15 bp, Homo sapiens
aggtcaggagttcga

SEQ ID NO: 38811 - DNA, 15 bp, Homo sapiens
ggtcaggagttcgag

SEQ ID NO: 38812 - DNA, 15 bp, Homo sapiens
gtcaggagttcgaga

SEQ ID NO: 38813 - DNA, 15 bp, Homo sapiens
tcaggagttcgagac

SEQ ID NO: 38814 - DNA, 15 bp, Homo sapiens
caggagttcgagacc

SEQ ID NO: 38815 - DNA, 15 bp, Homo sapiens
aggagttcgagacca

SEQ ID NO: 38816 - DNA, 15 bp, Homo sapiens
ggagttcgagaccag

SEQ ID NO: 38817 - DNA, 15 bp, Homo sapiens
gagttcgagaccagc

SEQ ID NO: 38818 - DNA, 15 bp, Homo sapiens
agttcgagaccagcc

SEQ ID NO: 38819 - DNA, 15 bp, Homo sapiens
gttcgagaccagcct

SEQ ID NO: 38820 - DNA, 15 bp, Homo sapiens
ttcgagaccagcctg

SEQ ID NO: 38821 - DNA, 15 bp, Homo sapiens
tcgagaccagcctgg

SEQ ID NO: 38822 - DNA, 15 bp, Homo sapiens
cgagaccagcctggc

SEQ ID NO: 38823 - DNA, 15 bp, Homo sapiens
gagaccagcctggct

SEQ ID NO: 38824 - DNA, 15 bp, Homo sapiens
agaccagcctggcta

SEQ ID NO: 38825 - DNA, 15 bp, Homo sapiens
gaccagcctggctaa

SEQ ID NO: 38826 - DNA, 15 bp, Homo sapiens
accagcctggctaac

SEQ ID NO: 38827 - DNA, 15 bp, Homo sapiens
ccagcctggctaaca

SEQ ID NO: 38828 - DNA, 15 bp, Homo sapiens
cagcctggctaacat

SEQ ID NO: 38829 - DNA, 15 bp, Homo sapiens
agcctggctaacatg

SEQ ID NO: 38830 - DNA, 15 bp, Homo sapiens
gcctggctaacatgg

SEQ ID NO: 38831 - DNA, 15 bp, Homo sapiens
cctggctaacatggt

SEQ ID NO: 38832 - DNA, 15 bp, Homo sapiens
ctggctaacatggtg

SEQ ID NO: 38833 - DNA, 15 bp, Homo sapiens
tggctaacatggtga

SEQ ID NO: 38834 - DNA, 15 bp, Homo sapiens
ggctaacatggtgaa

SEQ ID NO: 38835 - DNA, 15 bp, Homo sapiens
gctaacatggtgaaa

SEQ ID NO: 38836 - DNA, 15 bp, Homo sapiens
ctaacatggtgaaac

SEQ ID NO: 38837 - DNA, 15 bp, Homo sapiens
taacatggtgaaacc

SEQ ID NO: 38838 - DNA, 15 bp, Homo sapiens
aacatggtgaaaccc

SEQ ID NO: 38839 - DNA, 15 bp, Homo sapiens
acatggtgaaacccc

SEQ ID NO: 38840 - DNA, 15 bp, Homo sapiens
catggtgaaacccca

SEQ ID NO: 38841 - DNA, 15 bp, Homo sapiens
atggtgaaaccccat

SEQ ID NO: 38842 - DNA, 15 bp, Homo sapiens
tggtgaaaccccatc

SEQ ID NO: 38843 - DNA, 15 bp, Homo sapiens
ggtgaaaccccatct

SEQ ID NO: 38844 - DNA, 15 bp, Homo sapiens
gtgaaaccccatctc

SEQ ID NO: 38845 - DNA, 15 bp, Homo sapiens
tgaaaccccatctct

SEQ ID NO: 38846 - DNA, 15 bp, Homo sapiens
gaaaccccatctcta

SEQ ID NO: 38847 - DNA, 15 bp, Homo sapiens
aaaccccatctctac

SEQ ID NO: 38848 - DNA, 15 bp, Homo sapiens
aaccccatctctacc

SEQ ID NO: 38849 - DNA, 15 bp, Homo sapiens
accccatctctacca

SEQ ID NO: 38850 - DNA, 15 bp, Homo sapiens
ccccatctctaccaa

SEQ ID NO: 38851 - DNA, 15 bp, Homo sapiens
cccatctctaccaaa

SEQ ID NO: 38852 - DNA, 15 bp, Homo sapiens
ccatctctaccaaaa

SEQ ID NO: 38853 - DNA, 15 bp, Homo sapiens
catctctaccaaaaa

SEQ ID NO: 38854 - DNA, 15 bp, Homo sapiens
atctctaccaaaaat

SEQ ID NO: 38855 - DNA, 15 bp, Homo sapiens
tctctaccaaaaata

SEQ ID NO: 38856 - DNA, 15 bp, Homo sapiens
ctctaccaaaaatac

SEQ ID NO: 38857 - DNA, 15 bp, Homo sapiens
tctaccaaaaataca

SEQ ID NO: 38858 - DNA, 15 bp, Homo sapiens
ctaccaaaaatacaa

SEQ ID NO: 38859 - DNA, 15 bp, Homo sapiens
taccaaaaatacaaa

SEQ ID NO: 38860 - DNA, 15 bp, Homo sapiens
accaaaaatacaaaa

SEQ ID NO: 38861 - DNA, 15 bp, Homo sapiens
ccaaaaatacaaaaa

SEQ ID NO: 38862 - DNA, 15 bp, Homo sapiens
caaaaatacaaaaat

SEQ ID NO: 38863 - DNA, 15 bp, Homo sapiens
aaaaatacaaaaatt

SEQ ID NO: 38864 - DNA, 15 bp, Homo sapiens
atacaaaaattagct

SEQ ID NO: 38865 - DNA, 15 bp, Homo sapiens
tacaaaaattagctg

SEQ ID NO: 38866 - DNA, 15 bp, Homo sapiens
acaaaaattagctgg

SEQ ID NO: 38867 - DNA, 15 bp, Homo sapiens
caaaaattagctggg

SEQ ID NO: 38868 - DNA, 15 bp, Homo sapiens
aaaaattagctgggc

SEQ ID NO: 38869 - DNA, 15 bp, Homo sapiens
aaaattagctgggcg

SEQ ID NO: 38870 - DNA, 15 bp, Homo sapiens
aaattagctgggcgt

SEQ ID NO: 38871 - DNA, 15 bp, Homo sapiens
aattagctgggcgta

SEQ ID NO: 38872 - DNA, 15 bp, Homo sapiens
attagctgggcgtag

SEQ ID NO: 38873 - DNA, 15 bp, Homo sapiens
ttagctgggcgtagt

SEQ ID NO: 38874 - DNA, 15 bp, Homo sapiens
tagctgggcgtagtg

SEQ ID NO: 38875 - DNA, 15 bp, Homo sapiens
agctgggcgtagtga

SEQ ID NO: 38876 - DNA, 15 bp, Homo sapiens
gctgggcgtagtgac

SEQ ID NO: 38877 - DNA, 15 bp, Homo sapiens
ctgggcgtagtgacg

SEQ ID NO: 38878 - DNA, 15 bp, Homo sapiens
tgggcgtagtgacgg

SEQ ID NO: 38879 - DNA, 15 bp, Homo sapiens
gggcgtagtgacggg

SEQ ID NO: 38880 - DNA, 15 bp, Homo sapiens
ggcgtagtgacgggc

SEQ ID NO: 38881 - DNA, 15 bp, Homo sapiens
gcgtagtgacgggca

SEQ ID NO: 38882 - DNA, 15 bp, Homo sapiens
cgtagtgacgggcac

SEQ ID NO: 38883 - DNA, 15 bp, Homo sapiens
gtagtgacgggcacc

SEQ ID NO: 38884 - DNA, 15 bp, Homo sapiens
tagtgacgggcacct

SEQ ID NO: 38885 - DNA, 15 bp, Homo sapiens
agtgacgggcacctg

SEQ ID NO: 38886 - DNA, 15 bp, Homo sapiens
gtgacgggcacctgt

SEQ ID NO: 38887 - DNA, 15 bp, Homo sapiens
tgacgggcacctgta

SEQ ID NO: 38888 - DNA, 15 bp, Homo sapiens
gacgggcacctgtag

SEQ ID NO: 38889 - DNA, 15 bp, Homo sapiens
acgggcacctgtagt

SEQ ID NO: 38890 - DNA, 15 bp, Homo sapiens
cgggcacctgtagtc

SEQ ID NO: 38891 - DNA, 15 bp, Homo sapiens
gggcacctgtagtcc

SEQ ID NO: 38892 - DNA, 15 bp, Homo sapiens
ggcacctgtagtccc

SEQ ID NO: 38893 - DNA, 15 bp, Homo sapiens
gcacctgtagtccca

SEQ ID NO: 38894 - DNA, 15 bp, Homo sapiens
cacctgtagtcccag

SEQ ID NO: 38895 - DNA, 15 bp, Homo sapiens
acctgtagtcccagc

SEQ ID NO: 38896 - DNA, 15 bp, Homo sapiens
cctgtagtcccagct

SEQ ID NO: 38897 - DNA, 15 bp, Homo sapiens
ctgtagtcccagcta

SEQ ID NO: 38898 - DNA, 15 bp, Homo sapiens
tgtagtcccagctac

SEQ ID NO: 38899 - DNA, 15 bp, Homo sapiens
gtagtcccagctact

SEQ ID NO: 38900 - DNA, 15 bp, Homo sapiens
tagtcccagctactc

SEQ ID NO: 38901 - DNA, 15 bp, Homo sapiens
agtcccagctactcg

SEQ ID NO: 38902 - DNA, 15 bp, Homo sapiens
gtcccagctactcgg

SEQ ID NO: 38903 - DNA, 15 bp, Homo sapiens
tactcgggaggctga

SEQ ID NO: 38904 - DNA, 15 bp, Homo sapiens
actcgggaggctgag

SEQ ID NO: 38905 - DNA, 15 bp, Homo sapiens
ctcgggaggctgagg

SEQ ID NO: 38906 - DNA, 15 bp, Homo sapiens
tcgggaggctgaggc

SEQ ID NO: 38907 - DNA, 15 bp, Homo sapiens
cgggaggctgaggca

SEQ ID NO: 38908 - DNA, 15 bp, Homo sapiens
gaggctgaggcagaa

SEQ ID NO: 38909 - DNA, 15 bp, Homo sapiens
aggctgaggcagaag

SEQ ID NO: 38910 - DNA, 15 bp, Homo sapiens
ggctgaggcagaaga

SEQ ID NO: 38911 - DNA, 15 bp, Homo sapiens
gctgaggcagaagac

SEQ ID NO: 38912 - DNA, 15 bp, Homo sapiens
ctgaggcagaagact

SEQ ID NO: 38913 - DNA, 15 bp, Homo sapiens
tgaggcagaagactt

SEQ ID NO: 38914 - DNA, 15 bp, Homo sapiens
gaggcagaagacttg

SEQ ID NO: 38915 - DNA, 15 bp, Homo sapiens
aggcagaagacttgc

SEQ ID NO: 38916 - DNA, 15 bp, Homo sapiens
ggcagaagacttgct

SEQ ID NO: 38917 - DNA, 15 bp, Homo sapiens
gcagaagacttgctt

SEQ ID NO: 38918 - DNA, 15 bp, Homo sapiens
cagaagacttgcttg

SEQ ID NO: 38919 - DNA, 15 bp, Homo sapiens
agaagacttgcttga

SEQ ID NO: 38920 - DNA, 15 bp, Homo sapiens
gaagacttgcttgaa

SEQ ID NO: 38921 - DNA, 15 bp, Homo sapiens
aagacttgcttgaat

SEQ ID NO: 38922 - DNA, 15 bp, Homo sapiens
agacttgcttgaatc

SEQ ID NO: 38923 - DNA, 15 bp, Homo sapiens
gacttgcttgaatct

SEQ ID NO: 38924 - DNA, 15 bp, Homo sapiens
acttgcttgaatctg

SEQ ID NO: 38925 - DNA, 15 bp, Homo sapiens
cttgcttgaatctgg

SEQ ID NO: 38926 - DNA, 15 bp, Homo sapiens
ttgcttgaatctggg

SEQ ID NO: 38927 - DNA, 15 bp, Homo sapiens
tgcttgaatctggga

SEQ ID NO: 38928 - DNA, 15 bp, Homo sapiens
gcttgaatctgggag

SEQ ID NO: 38929 - DNA, 15 bp, Homo sapiens
cttgaatctgggagg

SEQ ID NO: 38930 - DNA, 15 bp, Homo sapiens
ttgaatctgggaggt

SEQ ID NO: 38931 - DNA, 15 bp, Homo sapiens
tgaatctgggaggtg

SEQ ID NO: 38932 - DNA, 15 bp, Homo sapiens
gaatctgggaggtgg

SEQ ID NO: 38933 - DNA, 15 bp, Homo sapiens
aatctgggaggtggg

SEQ ID NO: 38934 - DNA, 15 bp, Homo sapiens
atctgggaggtgggg

SEQ ID NO: 38935 - DNA, 15 bp, Homo sapiens
tctgggaggtggggg

SEQ ID NO: 38936 - DNA, 15 bp, Homo sapiens
ctgggaggtgggggt

SEQ ID NO: 38937 - DNA, 15 bp, Homo sapiens
tgggaggtgggggtt

SEQ ID NO: 38938 - DNA, 15 bp, Homo sapiens
gggaggtgggggttg

SEQ ID NO: 38939 - DNA, 15 bp, Homo sapiens
ggaggtgggggttgc

SEQ ID NO: 38940 - DNA, 15 bp, Homo sapiens
gaggtgggggttgca

SEQ ID NO: 38941 - DNA, 15 bp, Homo sapiens
aggtgggggttgcag

SEQ ID NO: 38942 - DNA, 15 bp, Homo sapiens
ggtgggggttgcagt

SEQ ID NO: 38943 - DNA, 15 bp, Homo sapiens
gtgggggttgcagtg

SEQ ID NO: 38944 - DNA, 15 bp, Homo sapiens
tgggggttgcagtga

SEQ ID NO: 38945 - DNA, 15 bp, Homo sapiens
gggggttgcagtgag

SEQ ID NO: 38946 - DNA, 15 bp, Homo sapiens
ggggttgcagtgagc

SEQ ID NO: 38947 - DNA, 15 bp, Homo sapiens
gggttgcagtgagcc

SEQ ID NO: 38948 - DNA, 15 bp, Homo sapiens
ggttgcagtgagccg

SEQ ID NO: 38949 - DNA, 15 bp, Homo sapiens
gttgcagtgagccga

SEQ ID NO: 38950 - DNA, 15 bp, Homo sapiens
ttgcagtgagccgag

SEQ ID NO: 38951 - DNA, 15 bp, Homo sapiens
tgcagtgagccgaga

SEQ ID NO: 38952 - DNA, 15 bp, Homo sapiens
gcagtgagccgagat

SEQ ID NO: 38953 - DNA, 15 bp, Homo sapiens
cagtgagccgagatt

SEQ ID NO: 38954 - DNA, 15 bp, Homo sapiens
agtgagccgagattg

SEQ ID NO: 38955 - DNA, 15 bp, Homo sapiens
gtgagccgagattgc

SEQ ID NO: 38956 - DNA, 15 bp, Homo sapiens
tgagccgagattgca

SEQ ID NO: 38957 - DNA, 15 bp, Homo sapiens
gagccgagattgcac

SEQ ID NO: 38958 - DNA, 15 bp, Homo sapiens
agccgagattgcacc

SEQ ID NO: 38959 - DNA, 15 bp, Homo sapiens
gccgagattgcacca

SEQ ID NO: 38960 - DNA, 15 bp, Homo sapiens
ccgagattgcaccac

SEQ ID NO: 38961 - DNA, 15 bp, Homo sapiens
cgagattgcaccact

SEQ ID NO: 38962 - DNA, 15 bp, Homo sapiens
gagattgcaccactg

SEQ ID NO: 38963 - DNA, 15 bp, Homo sapiens
agattgcaccactgc

SEQ ID NO: 38964 - DNA, 15 bp, Homo sapiens
gattgcaccactgca

SEQ ID NO: 38965 - DNA, 15 bp, Homo sapiens
attgcaccactgcac

SEQ ID NO: 38966 - DNA, 15 bp, Homo sapiens
ttgcaccactgcact

SEQ ID NO: 38967 - DNA, 15 bp, Homo sapiens
tgcaccactgcactc

SEQ ID NO: 38968 - DNA, 15 bp, Homo sapiens
gcaccactgcactcc

SEQ ID NO: 38969 - DNA, 15 bp, Homo sapiens
caccactgcactcca

SEQ ID NO: 38970 - DNA, 15 bp, Homo sapiens
tgcactccagcctgg

SEQ ID NO: 38971 - DNA, 15 bp, Homo sapiens
gcactccagcctggg

SEQ ID NO: 38972 - DNA, 15 bp, Homo sapiens
cactccagcctgggc

SEQ ID NO: 38973 - DNA, 15 bp, Homo sapiens
actccagcctgggcg

SEQ ID NO: 38974 - DNA, 15 bp, Homo sapiens
ctccagcctgggcga

SEQ ID NO: 38975 - DNA, 15 bp, Homo sapiens
tccagcctgggcgac

SEQ ID NO: 38976 - DNA, 15 bp, Homo sapiens
ccagcctgggcgaca

SEQ ID NO: 38977 - DNA, 15 bp, Homo sapiens
cagcctgggcgacag

SEQ ID NO: 38978 - DNA, 15 bp, Homo sapiens
agcctgggcgacaga

SEQ ID NO: 38979 - DNA, 15 bp, Homo sapiens
gcctgggcgacagag

SEQ ID NO: 38980 - DNA, 15 bp, Homo sapiens
cctgggcgacagagc

SEQ ID NO: 38981 - DNA, 15 bp, Homo sapiens
ctgggcgacagagca

SEQ ID NO: 38982 - DNA, 15 bp, Homo sapiens
tgggtaagcagggca

SEQ ID NO: 38983 - DNA, 15 bp, Homo sapiens
gggtaagcagggcag

SEQ ID NO: 38984 - DNA, 15 bp, Homo sapiens
ggtaagcagggcagc

SEQ ID NO: 38985 - DNA, 15 bp, Homo sapiens
gtaagcagggcagct

SEQ ID NO: 38986 - DNA, 15 bp, Homo sapiens
taagcagggcagctc

SEQ ID NO: 38987 - DNA, 15 bp, Homo sapiens
aagcagggcagctcg

SEQ ID NO: 38988 - DNA, 15 bp, Homo sapiens
agcagggcagctcgg

SEQ ID NO: 38989 - DNA, 15 bp, Homo sapiens
gcagggcagctcggc

SEQ ID NO: 38990 - DNA, 15 bp, Homo sapiens
cagggcagctcggcc

SEQ ID NO: 38991 - DNA, 15 bp, Homo sapiens
agggcagctcggccc

SEQ ID NO: 38992 - DNA, 15 bp, Homo sapiens
gggcagctcggcccc

SEQ ID NO: 38993 - DNA, 15 bp, Homo sapiens
ggcagctcggcccca

SEQ ID NO: 38994 - DNA, 15 bp, Homo sapiens
gcagctcggccccaa

SEQ ID NO: 38995 - DNA, 15 bp, Homo sapiens
cagctcggccccaag

SEQ ID NO: 38996 - DNA, 15 bp, Homo sapiens
agctcggccccaagg

SEQ ID NO: 38997 - DNA, 15 bp, Homo sapiens
gctcggccccaagga

SEQ ID NO: 38998 - DNA, 15 bp, Homo sapiens
ctcggccccaaggag

SEQ ID NO: 38999 - DNA, 15 bp, Homo sapiens
tcggccccaaggagg

SEQ ID NO: 39000 - DNA, 15 bp, Homo sapiens
cggccccaaggagga

SEQ ID NO: 39001 - DNA, 15 bp, Homo sapiens
ggccccaaggaggag

SEQ ID NO: 39002 - DNA, 15 bp, Homo sapiens
gccccaaggaggagg

SEQ ID NO: 39003 - DNA, 15 bp, Homo sapiens
ccccaaggaggagga

SEQ ID NO: 39004 - DNA, 15 bp, Homo sapiens
cccaaggaggaggaa

SEQ ID NO: 39005 - DNA, 15 bp, Homo sapiens
ccaaggaggaggaag

SEQ ID NO: 39006 - DNA, 15 bp, Homo sapiens
caaggaggaggaaga

SEQ ID NO: 39007 - DNA, 15 bp, Homo sapiens
aaggaggaggaagac

SEQ ID NO: 39008 - DNA, 15 bp, Homo sapiens
aggaggaggaagaca

SEQ ID NO: 39009 - DNA, 15 bp, Homo sapiens
ggaggaggaagacaa

SEQ ID NO: 39010 - DNA, 15 bp, Homo sapiens
gaggaggaagacaaa

SEQ ID NO: 39011 - DNA, 15 bp, Homo sapiens
aggaggaagacaaag

SEQ ID NO: 39012 - DNA, 15 bp, Homo sapiens
ggaggaagacaaaga

SEQ ID NO: 39013 - DNA, 15 bp, Homo sapiens
gaggaagacaaagat

SEQ ID NO: 39014 - DNA, 15 bp, Homo sapiens
aggaagacaaagatg

SEQ ID NO: 39015 - DNA, 15 bp, Homo sapiens
ggaagacaaagatgg

SEQ ID NO: 39016 - DNA, 15 bp, Homo sapiens
gaagacaaagatggg

SEQ ID NO: 39017 - DNA, 15 bp, Homo sapiens
aagacaaagatgggg

SEQ ID NO: 39018 - DNA, 15 bp, Homo sapiens
agacaaagatggggt

SEQ ID NO: 39019 - DNA, 15 bp, Homo sapiens
gacaaagatggggtg

SEQ ID NO: 39020 - DNA, 15 bp, Homo sapiens
acaaagatggggtgg

SEQ ID NO: 39021 - DNA, 15 bp, Homo sapiens
caaagatggggtggg

SEQ ID NO: 39022 - DNA, 15 bp, Homo sapiens
aaagatggggtgggg

SEQ ID NO: 39023 - DNA, 15 bp, Homo sapiens
aagatggggtggggg

SEQ ID NO: 39024 - DNA, 15 bp, Homo sapiens
agatggggtggggga

SEQ ID NO: 39025 - DNA, 15 bp, Homo sapiens
gatggggtgggggac

SEQ ID NO: 39026 - DNA, 15 bp, Homo sapiens
atggggtgggggacc

SEQ ID NO: 39027 - DNA, 15 bp, Homo sapiens
tggggtgggggacct

SEQ ID NO: 39028 - DNA, 15 bp, Homo sapiens
ggggtgggggacctg

SEQ ID NO: 39029 - DNA, 15 bp, Homo sapiens
gggtgggggacctgc

SEQ ID NO: 39030 - DNA, 15 bp, Homo sapiens
ggtgggggacctgcc

SEQ ID NO: 39031 - DNA, 15 bp, Homo sapiens
gtgggggacctgcct

SEQ ID NO: 39032 - DNA, 15 bp, Homo sapiens
tgggggacctgcctc

SEQ ID NO: 39033 - DNA, 15 bp, Homo sapiens
gggggacctgcctcc

SEQ ID NO: 39034 - DNA, 15 bp, Homo sapiens
ggggacctgcctccc

SEQ ID NO: 39035 - DNA, 15 bp, Homo sapiens
gggacctgcctccca

SEQ ID NO: 39036 - DNA, 15 bp, Homo sapiens
ggacctgcctcccaa

SEQ ID NO: 39037 - DNA, 15 bp, Homo sapiens
gacctgcctcccaaa

SEQ ID NO: 39038 - DNA, 15 bp, Homo sapiens
acctgcctcccaaac

SEQ ID NO: 39039 - DNA, 15 bp, Homo sapiens
cctgcctcccaaact

SEQ ID NO: 39040 - DNA, 15 bp, Homo sapiens
ctgcctcccaaactc

SEQ ID NO: 39041 - DNA, 15 bp, Homo sapiens
tgcctcccaaactcc

SEQ ID NO: 39042 - DNA, 15 bp, Homo sapiens
gcctcccaaactcct

SEQ ID NO: 39043 - DNA, 15 bp, Homo sapiens
cctcccaaactcctg

SEQ ID NO: 39044 - DNA, 15 bp, Homo sapiens
ctcccaaactcctgt

SEQ ID NO: 39045 - DNA, 15 bp, Homo sapiens
tcccaaactcctgtc

SEQ ID NO: 39046 - DNA, 15 bp, Homo sapiens
cccaaactcctgtct

SEQ ID NO: 39047 - DNA, 15 bp, Homo sapiens
ccaaactcctgtctc

SEQ ID NO: 39048 - DNA, 15 bp, Homo sapiens
caaactcctgtctcc

SEQ ID NO: 39049 - DNA, 15 bp, Homo sapiens
aaactcctgtctccc

SEQ ID NO: 39050 - DNA, 15 bp, Homo sapiens
aactcctgtctccct

SEQ ID NO: 39051 - DNA, 15 bp, Homo sapiens
actcctgtctccctc

SEQ ID NO: 39052 - DNA, 15 bp, Homo sapiens
ctcctgtctccctct

SEQ ID NO: 39053 - DNA, 15 bp, Homo sapiens
tcctgtctccctctg

SEQ ID NO: 39054 - DNA, 15 bp, Homo sapiens
cctgtctccctctga

SEQ ID NO: 39055 - DNA, 15 bp, Homo sapiens
ctgtctccctctgag

SEQ ID NO: 39056 - DNA, 15 bp, Homo sapiens
tgtctccctctgagt

SEQ ID NO: 39057 - DNA, 15 bp, Homo sapiens
gtctccctctgagtg

SEQ ID NO: 39058 - DNA, 15 bp, Homo sapiens
tctccctctgagtgc

SEQ ID NO: 39059 - DNA, 15 bp, Homo sapiens
ctccctctgagtgcc

SEQ ID NO: 39060 - DNA, 15 bp, Homo sapiens
tccctctgagtgccc

SEQ ID NO: 39061 - DNA, 15 bp, Homo sapiens
ccctctgagtgccct

SEQ ID NO: 39062 - DNA, 15 bp, Homo sapiens
cctctgagtgccctc

SEQ ID NO: 39063 - DNA, 15 bp, Homo sapiens
ctctgagtgccctca

SEQ ID NO: 39064 - DNA, 15 bp, Homo sapiens
tctgagtgccctcag

SEQ ID NO: 39065 - DNA, 15 bp, Homo sapiens
ctgagtgccctcaga

SEQ ID NO: 39066 - DNA, 15 bp, Homo sapiens
tgagtgccctcagag

SEQ ID NO: 39067 - DNA, 15 bp, Homo sapiens
gagtgccctcagagt

SEQ ID NO: 39068 - DNA, 15 bp, Homo sapiens
agtgccctcagagtg

SEQ ID NO: 39069 - DNA, 15 bp, Homo sapiens
gtgccctcagagtgg

SEQ ID NO: 39070 - DNA, 15 bp, Homo sapiens
tgccctcagagtggg

SEQ ID NO: 39071 - DNA, 15 bp, Homo sapiens
gccctcagagtgggt

SEQ ID NO: 39072 - DNA, 15 bp, Homo sapiens
ccctcagagtgggtt

SEQ ID NO: 39073 - DNA, 15 bp, Homo sapiens
cctcagagtgggttc

SEQ ID NO: 39074 - DNA, 15 bp, Homo sapiens
ctcagagtgggttcc

SEQ ID NO: 39075 - DNA, 15 bp, Homo sapiens
tcagagtgggttcct

SEQ ID NO: 39076 - DNA, 15 bp, Homo sapiens
cagagtgggttcctc

SEQ ID NO: 39077 - DNA, 15 bp, Homo sapiens
agagtgggttcctcc

SEQ ID NO: 39078 - DNA, 15 bp, Homo sapiens
gagtgggttcctcca

SEQ ID NO: 39079 - DNA, 15 bp, Homo sapiens
agtgggttcctccat

SEQ ID NO: 39080 - DNA, 15 bp, Homo sapiens
gtgggttcctccatt

SEQ ID NO: 39081 - DNA, 15 bp, Homo sapiens
tgggttcctccattc

SEQ ID NO: 39082 - DNA, 15 bp, Homo sapiens
gggttcctccattcc

SEQ ID NO: 39083 - DNA, 15 bp, Homo sapiens
ggttcctccattccc

SEQ ID NO: 39084 - DNA, 15 bp, Homo sapiens
gttcctccattccca

SEQ ID NO: 39085 - DNA, 15 bp, Homo sapiens
ttcctccattcccaa

SEQ ID NO: 39086 - DNA, 15 bp, Homo sapiens
tcctccattcccaag

SEQ ID NO: 39087 - DNA, 15 bp, Homo sapiens
cctccattcccaagc

SEQ ID NO: 39088 - DNA, 15 bp, Homo sapiens
ctccattcccaagcc

SEQ ID NO: 39089 - DNA, 15 bp, Homo sapiens
tccattcccaagccc

SEQ ID NO: 39090 - DNA, 15 bp, Homo sapiens
ccattcccaagcccc

SEQ ID NO: 39091 - DNA, 15 bp, Homo sapiens
cattcccaagcccca

SEQ ID NO: 39092 - DNA, 15 bp, Homo sapiens
attcccaagccccag

SEQ ID NO: 39093 - DNA, 15 bp, Homo sapiens
ttcccaagccccagc

SEQ ID NO: 39094 - DNA, 15 bp, Homo sapiens
tcccaagccccagcc

SEQ ID NO: 39095 - DNA, 15 bp, Homo sapiens
cccaagccccagccc

SEQ ID NO: 39096 - DNA, 15 bp, Homo sapiens
ccaagccccagcccc

SEQ ID NO: 39097 - DNA, 15 bp, Homo sapiens
caagccccagcccca

SEQ ID NO: 39098 - DNA, 15 bp, Homo sapiens
aagccccagccccaa

SEQ ID NO: 39099 - DNA, 15 bp, Homo sapiens
agccccagccccaag

SEQ ID NO: 39100 - DNA, 15 bp, Homo sapiens
gccccagccccaagg

SEQ ID NO: 39101 - DNA, 15 bp, Homo sapiens
ccccagccccaagga

SEQ ID NO: 39102 - DNA, 15 bp, Homo sapiens
cccagccccaaggat

SEQ ID NO: 39103 - DNA, 15 bp, Homo sapiens
ccagccccaaggatc

SEQ ID NO: 39104 - DNA, 15 bp, Homo sapiens
cagccccaaggatcc

SEQ ID NO: 39105 - DNA, 15 bp, Homo sapiens
agccccaaggatccc

SEQ ID NO: 39106 - DNA, 15 bp, Homo sapiens
gccccaaggatcccc

SEQ ID NO: 39107 - DNA, 15 bp, Homo sapiens
ccccaaggatcccca

SEQ ID NO: 39108 - DNA, 15 bp, Homo sapiens
cccaaggatccccaa

SEQ ID NO: 39109 - DNA, 15 bp, Homo sapiens
ccaaggatccccaag

SEQ ID NO: 39110 - DNA, 15 bp, Homo sapiens
caaggatccccaagc

SEQ ID NO: 39111 - DNA, 15 bp, Homo sapiens
aaggatccccaagcc

SEQ ID NO: 39112 - DNA, 15 bp, Homo sapiens
aggatccccaagccg

SEQ ID NO: 39113 - DNA, 15 bp, Homo sapiens
ggatccccaagccgt

SEQ ID NO: 39114 - DNA, 15 bp, Homo sapiens
gatccccaagccgtg

SEQ ID NO: 39115 - DNA, 15 bp, Homo sapiens
atccccaagccgtgc

SEQ ID NO: 39116 - DNA, 15 bp, Homo sapiens
tccccaagccgtgcc

SEQ ID NO: 39117 - DNA, 15 bp, Homo sapiens
ccccaagccgtgcct

SEQ ID NO: 39118 - DNA, 15 bp, Homo sapiens
cccaagccgtgcctc

SEQ ID NO: 39119 - DNA, 15 bp, Homo sapiens
ccaagccgtgcctca

SEQ ID NO: 39120 - DNA, 15 bp, Homo sapiens
caagccgtgcctcaa

SEQ ID NO: 39121 - DNA, 15 bp, Homo sapiens
aagccgtgcctcaaa

SEQ ID NO: 39122 - DNA, 15 bp, Homo sapiens
agccgtgcctcaaat

SEQ ID NO: 39123 - DNA, 15 bp, Homo sapiens
gccgtgcctcaaatg

SEQ ID NO: 39124 - DNA, 15 bp, Homo sapiens
ccgtgcctcaaatgt

SEQ ID NO: 39125 - DNA, 15 bp, Homo sapiens
cgtgcctcaaatgtg

SEQ ID NO: 39126 - DNA, 15 bp, Homo sapiens
gtgcctcaaatgtga

SEQ ID NO: 39127 - DNA, 15 bp, Homo sapiens
tgcctcaaatgtgac

SEQ ID NO: 39128 - DNA, 15 bp, Homo sapiens
gcctcaaatgtgacc

SEQ ID NO: 39129 - DNA, 15 bp, Homo sapiens
cctcaaatgtgaccc

SEQ ID NO: 39130 - DNA, 15 bp, Homo sapiens
ctcaaatgtgacccc

SEQ ID NO: 39131 - DNA, 15 bp, Homo sapiens
tcaaatgtgacccct

SEQ ID NO: 39132 - DNA, 15 bp, Homo sapiens
caaatgtgacccctc

SEQ ID NO: 39133 - DNA, 15 bp, Homo sapiens
aaatgtgacccctca

SEQ ID NO: 39134 - DNA, 15 bp, Homo sapiens
aatgtgacccctcat

SEQ ID NO: 39135 - DNA, 15 bp, Homo sapiens
atgtgacccctcatg

SEQ ID NO: 39136 - DNA, 15 bp, Homo sapiens
tgtgacccctcatgc

SEQ ID NO: 39137 - DNA, 15 bp, Homo sapiens
gtgacccctcatgct

SEQ ID NO: 39138 - DNA, 15 bp, Homo sapiens
tgacccctcatgctg

SEQ ID NO: 39139 - DNA, 15 bp, Homo sapiens
gacccctcatgctgg

SEQ ID NO: 39140 - DNA, 15 bp, Homo sapiens
acccctcatgctggc

SEQ ID NO: 39141 - DNA, 15 bp, Homo sapiens
cccctcatgctggct

SEQ ID NO: 39142 - DNA, 15 bp, Homo sapiens
ccctcatgctggctt

SEQ ID NO: 39143 - DNA, 15 bp, Homo sapiens
cctcatgctggcttc

SEQ ID NO: 39144 - DNA, 15 bp, Homo sapiens
ctcatgctggcttca

SEQ ID NO: 39145 - DNA, 15 bp, Homo sapiens
tcatgctggcttcac

SEQ ID NO: 39146 - DNA, 15 bp, Homo sapiens
catgctggcttcacc

SEQ ID NO: 39147 - DNA, 15 bp, Homo sapiens
atgctggcttcaccc

SEQ ID NO: 39148 - DNA, 15 bp, Homo sapiens
tgctggcttcacccc

SEQ ID NO: 39149 - DNA, 15 bp, Homo sapiens
gctggcttcacccca

SEQ ID NO: 39150 - DNA, 15 bp, Homo sapiens
ctggcttcaccccaa

SEQ ID NO: 39151 - DNA, 15 bp, Homo sapiens
tggcttcaccccaaa

SEQ ID NO: 39152 - DNA, 15 bp, Homo sapiens
ggcttcaccccaaac

SEQ ID NO: 39153 - DNA, 15 bp, Homo sapiens
gcttcaccccaaacc

SEQ ID NO: 39154 - DNA, 15 bp, Homo sapiens
cttcaccccaaacct

SEQ ID NO: 39155 - DNA, 15 bp, Homo sapiens
ttcaccccaaacctg

SEQ ID NO: 39156 - DNA, 15 bp, Homo sapiens
tcaccccaaacctgt

SEQ ID NO: 39157 - DNA, 15 bp, Homo sapiens
caccccaaacctgtc

SEQ ID NO: 39158 - DNA, 15 bp, Homo sapiens
accccaaacctgtcc

SEQ ID NO: 39159 - DNA, 15 bp, Homo sapiens
ccccaaacctgtccg

SEQ ID NO: 39160 - DNA, 15 bp, Homo sapiens
cccaaacctgtccgc

SEQ ID NO: 39161 - DNA, 15 bp, Homo sapiens
ccaaacctgtccgca

SEQ ID NO: 39162 - DNA, 15 bp, Homo sapiens
caaacctgtccgcaa

SEQ ID NO: 39163 - DNA, 15 bp, Homo sapiens
aaacctgtccgcaaa

SEQ ID NO: 39164 - DNA, 15 bp, Homo sapiens
aacctgtccgcaaat

SEQ ID NO: 39165 - DNA, 15 bp, Homo sapiens
acctgtccgcaaatc

SEQ ID NO: 39166 - DNA, 15 bp, Homo sapiens
cctgtccgcaaatcc

SEQ ID NO: 39167 - DNA, 15 bp, Homo sapiens
ctgtccgcaaatcca

SEQ ID NO: 39168 - DNA, 15 bp, Homo sapiens
tgtccgcaaatccaa

SEQ ID NO: 39169 - DNA, 15 bp, Homo sapiens
gtccgcaaatccaaa

SEQ ID NO: 39170 - DNA, 15 bp, Homo sapiens
tccgcaaatccaaac

SEQ ID NO: 39171 - DNA, 15 bp, Homo sapiens
ccgcaaatccaaacc

SEQ ID NO: 39172 - DNA, 15 bp, Homo sapiens
cgcaaatccaaacct

SEQ ID NO: 39173 - DNA, 15 bp, Homo sapiens
gcaaatccaaaccta

SEQ ID NO: 39174 - DNA, 15 bp, Homo sapiens
caaatccaaacctaa

SEQ ID NO: 39175 - DNA, 15 bp, Homo sapiens
aaatccaaacctaaa

SEQ ID NO: 39176 - DNA, 15 bp, Homo sapiens
aatccaaacctaaac

SEQ ID NO: 39177 - DNA, 15 bp, Homo sapiens
atccaaacctaaacc

SEQ ID NO: 39178 - DNA, 15 bp, Homo sapiens
tccaaacctaaacca

SEQ ID NO: 39179 - DNA, 15 bp, Homo sapiens
ccaaacctaaaccac

SEQ ID NO: 39180 - DNA, 15 bp, Homo sapiens
caaacctaaaccacc

SEQ ID NO: 39181 - DNA, 15 bp, Homo sapiens
aaacctaaaccacca

SEQ ID NO: 39182 - DNA, 15 bp, Homo sapiens
aacctaaaccaccat

SEQ ID NO: 39183 - DNA, 15 bp, Homo sapiens
acctaaaccaccatc

SEQ ID NO: 39184 - DNA, 15 bp, Homo sapiens
cctaaaccaccatcc

SEQ ID NO: 39185 - DNA, 15 bp, Homo sapiens
ctaaaccaccatcca

SEQ ID NO: 39186 - DNA, 15 bp, Homo sapiens
taaaccaccatccag

SEQ ID NO: 39187 - DNA, 15 bp, Homo sapiens
aaaccaccatccagg

SEQ ID NO: 39188 - DNA, 15 bp, Homo sapiens
aaccaccatccaggc

SEQ ID NO: 39189 - DNA, 15 bp, Homo sapiens
accaccatccaggcc

SEQ ID NO: 39190 - DNA, 15 bp, Homo sapiens
ccaccatccaggcca

SEQ ID NO: 39191 - DNA, 15 bp, Homo sapiens
caccatccaggccag

SEQ ID NO: 39192 - DNA, 15 bp, Homo sapiens
accatccaggccaga

SEQ ID NO: 39193 - DNA, 15 bp, Homo sapiens
ccatccaggccagag

SEQ ID NO: 39194 - DNA, 15 bp, Homo sapiens
catccaggccagagc

SEQ ID NO: 39195 - DNA, 15 bp, Homo sapiens
atccaggccagagca

SEQ ID NO: 39196 - DNA, 15 bp, Homo sapiens
tccaggccagagcat

SEQ ID NO: 39197 - DNA, 15 bp, Homo sapiens
ccaggccagagcatg

SEQ ID NO: 39198 - DNA, 15 bp, Homo sapiens
caggccagagcatgc

SEQ ID NO: 39199 - DNA, 15 bp, Homo sapiens
aggccagagcatgcc

SEQ ID NO: 39200 - DNA, 15 bp, Homo sapiens
ggccagagcatgcca

SEQ ID NO: 39201 - DNA, 15 bp, Homo sapiens
gccagagcatgccaa

SEQ ID NO: 39202 - DNA, 15 bp, Homo sapiens
ccagagcatgccaaa

SEQ ID NO: 39203 - DNA, 15 bp, Homo sapiens
cagagcatgccaaat

SEQ ID NO: 39204 - DNA, 15 bp, Homo sapiens
agagcatgccaaatt

SEQ ID NO: 39205 - DNA, 15 bp, Homo sapiens
gagcatgccaaattc

SEQ ID NO: 39206 - DNA, 15 bp, Homo sapiens
agcatgccaaattct

SEQ ID NO: 39207 - DNA, 15 bp, Homo sapiens
gcatgccaaattctg

SEQ ID NO: 39208 - DNA, 15 bp, Homo sapiens
catgccaaattctga

SEQ ID NO: 39209 - DNA, 15 bp, Homo sapiens
atgccaaattctgac

SEQ ID NO: 39210 - DNA, 15 bp, Homo sapiens
tgccaaattctgacc

SEQ ID NO: 39211 - DNA, 15 bp, Homo sapiens
gccaaattctgaccc

SEQ ID NO: 39212 - DNA, 15 bp, Homo sapiens
ccaaattctgaccct

SEQ ID NO: 39213 - DNA, 15 bp, Homo sapiens
caaattctgacccta

SEQ ID NO: 39214 - DNA, 15 bp, Homo sapiens
aaattctgaccctaa

SEQ ID NO: 39215 - DNA, 15 bp, Homo sapiens
aattctgaccctaaa

SEQ ID NO: 39216 - DNA, 15 bp, Homo sapiens
attctgaccctaaac

SEQ ID NO: 39217 - DNA, 15 bp, Homo sapiens
ttctgaccctaaacc

SEQ ID NO: 39218 - DNA, 15 bp, Homo sapiens
tctgaccctaaacct

SEQ ID NO: 39219 - DNA, 15 bp, Homo sapiens
ctgaccctaaaccta

SEQ ID NO: 39220 - DNA, 15 bp, Homo sapiens
tgaccctaaacctac

SEQ ID NO: 39221 - DNA, 15 bp, Homo sapiens
gaccctaaacctacc

SEQ ID NO: 39222 - DNA, 15 bp, Homo sapiens
accctaaacctaccc

SEQ ID NO: 39223 - DNA, 15 bp, Homo sapiens
ccctaaacctacccc

SEQ ID NO: 39224 - DNA, 15 bp, Homo sapiens
cctaaacctacccct

SEQ ID NO: 39225 - DNA, 15 bp, Homo sapiens
ctaaacctacccctt

SEQ ID NO: 39226 - DNA, 15 bp, Homo sapiens
taaacctaccccttt

SEQ ID NO: 39227 - DNA, 15 bp, Homo sapiens
aaacctacccctttc

SEQ ID NO: 39228 - DNA, 15 bp, Homo sapiens
aacctacccctttcc

SEQ ID NO: 39229 - DNA, 15 bp, Homo sapiens
acctacccctttcca

SEQ ID NO: 39230 - DNA, 15 bp, Homo sapiens
cctacccctttccag

SEQ ID NO: 39231 - DNA, 15 bp, Homo sapiens
ctacccctttccaga

SEQ ID NO: 39232 - DNA, 15 bp, Homo sapiens
tacccctttccagat

SEQ ID NO: 39233 - DNA, 15 bp, Homo sapiens
acccctttccagatg

SEQ ID NO: 39234 - DNA, 15 bp, Homo sapiens
cccctttccagatgt

SEQ ID NO: 39235 - DNA, 15 bp, Homo sapiens
ccctttccagatgtc

SEQ ID NO: 39236 - DNA, 15 bp, Homo sapiens
cctttccagatgtcc

SEQ ID NO: 39237 - DNA, 15 bp, Homo sapiens
ctttccagatgtcca

SEQ ID NO: 39238 - DNA, 15 bp, Homo sapiens
tttccagatgtccac

SEQ ID NO: 39239 - DNA, 15 bp, Homo sapiens
ttccagatgtccacc

SEQ ID NO: 39240 - DNA, 15 bp, Homo sapiens
tccagatgtccacct

SEQ ID NO: 39241 - DNA, 15 bp, Homo sapiens
ccagatgtccacctc

SEQ ID NO: 39242 - DNA, 15 bp, Homo sapiens
cagatgtccacctca

SEQ ID NO: 39243 - DNA, 15 bp, Homo sapiens
agatgtccacctcag

SEQ ID NO: 39244 - DNA, 15 bp, Homo sapiens
gatgtccacctcagc

SEQ ID NO: 39245 - DNA, 15 bp, Homo sapiens
atgtccacctcagcc

SEQ ID NO: 39246 - DNA, 15 bp, Homo sapiens
tgtccacctcagccc

SEQ ID NO: 39247 - DNA, 15 bp, Homo sapiens
gtccacctcagcccc

SEQ ID NO: 39248 - DNA, 15 bp, Homo sapiens
tccacctcagcccca

SEQ ID NO: 39249 - DNA, 15 bp, Homo sapiens
ccacctcagccccat

SEQ ID NO: 39250 - DNA, 15 bp, Homo sapiens
cacctcagccccata

SEQ ID NO: 39251 - DNA, 15 bp, Homo sapiens
acctcagccccatac

SEQ ID NO: 39252 - DNA, 15 bp, Homo sapiens
cctcagccccatacc

SEQ ID NO: 39253 - DNA, 15 bp, Homo sapiens
ctcagccccatacct

SEQ ID NO: 39254 - DNA, 15 bp, Homo sapiens
tcagccccataccta

SEQ ID NO: 39255 - DNA, 15 bp, Homo sapiens
cagccccatacctaa

SEQ ID NO: 39256 - DNA, 15 bp, Homo sapiens
agccccatacctaac

SEQ ID NO: 39257 - DNA, 15 bp, Homo sapiens
gccccatacctaacc

SEQ ID NO: 39258 - DNA, 15 bp, Homo sapiens
ccccatacctaaccc

SEQ ID NO: 39259 - DNA, 15 bp, Homo sapiens
cccatacctaaccct

SEQ ID NO: 39260 - DNA, 15 bp, Homo sapiens
ccatacctaaccctc

SEQ ID NO: 39261 - DNA, 15 bp, Homo sapiens
catacctaaccctct

SEQ ID NO: 39262 - DNA, 15 bp, Homo sapiens
atacctaaccctctc

SEQ ID NO: 39263 - DNA, 15 bp, Homo sapiens
tacctaaccctctcc

SEQ ID NO: 39264 - DNA, 15 bp, Homo sapiens
acctaaccctctcct

SEQ ID NO: 39265 - DNA, 15 bp, Homo sapiens
cctaaccctctcctg

SEQ ID NO: 39266 - DNA, 15 bp, Homo sapiens
ctaaccctctcctgg

SEQ ID NO: 39267 - DNA, 15 bp, Homo sapiens
taaccctctcctgga

SEQ ID NO: 39268 - DNA, 15 bp, Homo sapiens
aaccctctcctggac

SEQ ID NO: 39269 - DNA, 15 bp, Homo sapiens
accctctcctggacc

SEQ ID NO: 39270 - DNA, 15 bp, Homo sapiens
ccctctcctggaccc

SEQ ID NO: 39271 - DNA, 15 bp, Homo sapiens
cctctcctggaccca

SEQ ID NO: 39272 - DNA, 15 bp, Homo sapiens
ctctcctggacccat

SEQ ID NO: 39273 - DNA, 15 bp, Homo sapiens
tctcctggacccata

SEQ ID NO: 39274 - DNA, 15 bp, Homo sapiens
ctcctggacccataa

SEQ ID NO: 39275 - DNA, 15 bp, Homo sapiens
tcctggacccataaa

SEQ ID NO: 39276 - DNA, 15 bp, Homo sapiens
cctggacccataaaa

SEQ ID NO: 39277 - DNA, 15 bp, Homo sapiens
ctggacccataaaat

SEQ ID NO: 39278 - DNA, 15 bp, Homo sapiens
tggacccataaaata

SEQ ID NO: 39279 - DNA, 15 bp, Homo sapiens
ggacccataaaatag

SEQ ID NO: 39280 - DNA, 15 bp, Homo sapiens
gacccataaaatagc

SEQ ID NO: 39281 - DNA, 15 bp, Homo sapiens
acccataaaatagcc

SEQ ID NO: 39282 - DNA, 15 bp, Homo sapiens
cccataaaatagcct

SEQ ID NO: 39283 - DNA, 15 bp, Homo sapiens
ccataaaatagccta

SEQ ID NO: 39284 - DNA, 15 bp, Homo sapiens
cataaaatagcctaa

SEQ ID NO: 39285 - DNA, 15 bp, Homo sapiens
ataaaatagcctaaa

SEQ ID NO: 39286 - DNA, 15 bp, Homo sapiens
taaaatagcctaaag

SEQ ID NO: 39287 - DNA, 15 bp, Homo sapiens
aaaatagcctaaagc

SEQ ID NO: 39288 - DNA, 15 bp, Homo sapiens
aaatagcctaaagct

SEQ ID NO: 39289 - DNA, 15 bp, Homo sapiens
aatagcctaaagcta

SEQ ID NO: 39290 - DNA, 15 bp, Homo sapiens
atagcctaaagctaa

SEQ ID NO: 39291 - DNA, 15 bp, Homo sapiens
tagcctaaagctaac

SEQ ID NO: 39292 - DNA, 15 bp, Homo sapiens
agcctaaagctaacc

SEQ ID NO: 39293 - DNA, 15 bp, Homo sapiens
gcctaaagctaaccc

SEQ ID NO: 39294 - DNA, 15 bp, Homo sapiens
cctaaagctaacccc

SEQ ID NO: 39295 - DNA, 15 bp, Homo sapiens
ctaaagctaacccca

SEQ ID NO: 39296 - DNA, 15 bp, Homo sapiens
taaagctaaccccat

SEQ ID NO: 39297 - DNA, 15 bp, Homo sapiens
aaagctaaccccatc

SEQ ID NO: 39298 - DNA, 15 bp, Homo sapiens
aagctaaccccatct

SEQ ID NO: 39299 - DNA, 15 bp, Homo sapiens
agctaaccccatctc

SEQ ID NO: 39300 - DNA, 15 bp, Homo sapiens
gctaaccccatctct

SEQ ID NO: 39301 - DNA, 15 bp, Homo sapiens
ctaaccccatctctg

SEQ ID NO: 39302 - DNA, 15 bp, Homo sapiens
taaccccatctctgc

SEQ ID NO: 39303 - DNA, 15 bp, Homo sapiens
aaccccatctctgca

SEQ ID NO: 39304 - DNA, 15 bp, Homo sapiens
accccatctctgcac

SEQ ID NO: 39305 - DNA, 15 bp, Homo sapiens
ccccatctctgcacc

SEQ ID NO: 39306 - DNA, 15 bp, Homo sapiens
cccatctctgcacct

SEQ ID NO: 39307 - DNA, 15 bp, Homo sapiens
ccatctctgcacctt

SEQ ID NO: 39308 - DNA, 15 bp, Homo sapiens
catctctgcaccttg

SEQ ID NO: 39309 - DNA, 15 bp, Homo sapiens
atctctgcaccttgc

SEQ ID NO: 39310 - DNA, 15 bp, Homo sapiens
tctctgcaccttgcc

SEQ ID NO: 39311 - DNA, 15 bp, Homo sapiens
ctctgcaccttgccc

SEQ ID NO: 39312 - DNA, 15 bp, Homo sapiens
tctgcaccttgccct

SEQ ID NO: 39313 - DNA, 15 bp, Homo sapiens
ctgcaccttgcccta

SEQ ID NO: 39314 - DNA, 15 bp, Homo sapiens
tgcaccttgccctaa

SEQ ID NO: 39315 - DNA, 15 bp, Homo sapiens
gcaccttgccctaaa

SEQ ID NO: 39316 - DNA, 15 bp, Homo sapiens
caccttgccctaaac

SEQ ID NO: 39317 - DNA, 15 bp, Homo sapiens
accttgccctaaacg

SEQ ID NO: 39318 - DNA, 15 bp, Homo sapiens
ccttgccctaaacgt

SEQ ID NO: 39319 - DNA, 15 bp, Homo sapiens
cttgccctaaacgta

SEQ ID NO: 39320 - DNA, 15 bp, Homo sapiens
ttgccctaaacgtac

SEQ ID NO: 39321 - DNA, 15 bp, Homo sapiens
tgccctaaacgtacc

SEQ ID NO: 39322 - DNA, 15 bp, Homo sapiens
gccctaaacgtaccc

SEQ ID NO: 39323 - DNA, 15 bp, Homo sapiens
ccctaaacgtacccc

SEQ ID NO: 39324 - DNA, 15 bp, Homo sapiens
cctaaacgtacccca

SEQ ID NO: 39325 - DNA, 15 bp, Homo sapiens
ctaaacgtaccccag

SEQ ID NO: 39326 - DNA, 15 bp, Homo sapiens
taaacgtaccccagc

SEQ ID NO: 39327 - DNA, 15 bp, Homo sapiens
aaacgtaccccagct

SEQ ID NO: 39328 - DNA, 15 bp, Homo sapiens
aacgtaccccagctc

SEQ ID NO: 39329 - DNA, 15 bp, Homo sapiens
acgtaccccagctct

SEQ ID NO: 39330 - DNA, 15 bp, Homo sapiens
cgtaccccagctctt

SEQ ID NO: 39331 - DNA, 15 bp, Homo sapiens
gtaccccagctctta

SEQ ID NO: 39332 - DNA, 15 bp, Homo sapiens
taccccagctcttac

SEQ ID NO: 39333 - DNA, 15 bp, Homo sapiens
accccagctcttact

SEQ ID NO: 39334 - DNA, 15 bp, Homo sapiens
ccccagctcttactc

SEQ ID NO: 39335 - DNA, 15 bp, Homo sapiens
cccagctcttactct

SEQ ID NO: 39336 - DNA, 15 bp, Homo sapiens
ccagctcttactcta

SEQ ID NO: 39337 - DNA, 15 bp, Homo sapiens
cagctcttactctaa

SEQ ID NO: 39338 - DNA, 15 bp, Homo sapiens
agctcttactctaac

SEQ ID NO: 39339 - DNA, 15 bp, Homo sapiens
gctcttactctaact

SEQ ID NO: 39340 - DNA, 15 bp, Homo sapiens
ctcttactctaactc

SEQ ID NO: 39341 - DNA, 15 bp, Homo sapiens
tcttactctaactcc

SEQ ID NO: 39342 - DNA, 15 bp, Homo sapiens
cttactctaactcct

SEQ ID NO: 39343 - DNA, 15 bp, Homo sapiens
ttactctaactcctt

SEQ ID NO: 39344 - DNA, 15 bp, Homo sapiens
tactctaactccttc

SEQ ID NO: 39345 - DNA, 15 bp, Homo sapiens
actctaactccttcc

SEQ ID NO: 39346 - DNA, 15 bp, Homo sapiens
ctctaactccttccc

SEQ ID NO: 39347 - DNA, 15 bp, Homo sapiens
tctaactccttcccc

SEQ ID NO: 39348 - DNA, 15 bp, Homo sapiens
ctaactccttcccca

SEQ ID NO: 39349 - DNA, 15 bp, Homo sapiens
taactccttccccag

SEQ ID NO: 39350 - DNA, 15 bp, Homo sapiens
aactccttccccagc

SEQ ID NO: 39351 - DNA, 15 bp, Homo sapiens
actccttccccagcc

SEQ ID NO: 39352 - DNA, 15 bp, Homo sapiens
ctccttccccagcct

SEQ ID NO: 39353 - DNA, 15 bp, Homo sapiens
tccttccccagcctt

SEQ ID NO: 39354 - DNA, 15 bp, Homo sapiens
ccttccccagccttt

SEQ ID NO: 39355 - DNA, 15 bp, Homo sapiens
cttccccagccttta

SEQ ID NO: 39356 - DNA, 15 bp, Homo sapiens
ttccccagcctttat

SEQ ID NO: 39357 - DNA, 15 bp, Homo sapiens
tccccagcctttatg

SEQ ID NO: 39358 - DNA, 15 bp, Homo sapiens
ccccagcctttatgc

SEQ ID NO: 39359 - DNA, 15 bp, Homo sapiens
cccagcctttatgcc

SEQ ID NO: 39360 - DNA, 15 bp, Homo sapiens
ccagcctttatgcca

SEQ ID NO: 39361 - DNA, 15 bp, Homo sapiens
cagcctttatgccaa

SEQ ID NO: 39362 - DNA, 15 bp, Homo sapiens
agcctttatgccaac

SEQ ID NO: 39363 - DNA, 15 bp, Homo sapiens
gcctttatgccaacc

SEQ ID NO: 39364 - DNA, 15 bp, Homo sapiens
cctttatgccaaccc

SEQ ID NO: 39365 - DNA, 15 bp, Homo sapiens
ctttatgccaaccca

SEQ ID NO: 39366 - DNA, 15 bp, Homo sapiens
tttatgccaacccaa

SEQ ID NO: 39367 - DNA, 15 bp, Homo sapiens
ttatgccaacccaac

SEQ ID NO: 39368 - DNA, 15 bp, Homo sapiens
tatgccaacccaacc

SEQ ID NO: 39369 - DNA, 15 bp, Homo sapiens
atgccaacccaaccc

SEQ ID NO: 39370 - DNA, 15 bp, Homo sapiens
tgccaacccaacccc

SEQ ID NO: 39371 - DNA, 15 bp, Homo sapiens
gccaacccaacccca

SEQ ID NO: 39372 - DNA, 15 bp, Homo sapiens
ccaacccaaccccat

SEQ ID NO: 39373 - DNA, 15 bp, Homo sapiens
caacccaaccccatc

SEQ ID NO: 39374 - DNA, 15 bp, Homo sapiens
aacccaaccccatct

SEQ ID NO: 39375 - DNA, 15 bp, Homo sapiens
acccaaccccatctc

SEQ ID NO: 39376 - DNA, 15 bp, Homo sapiens
cccaaccccatctcc

SEQ ID NO: 39377 - DNA, 15 bp, Homo sapiens
ccaaccccatctcct

SEQ ID NO: 39378 - DNA, 15 bp, Homo sapiens
caaccccatctcctt

SEQ ID NO: 39379 - DNA, 15 bp, Homo sapiens
aaccccatctccttc

SEQ ID NO: 39380 - DNA, 15 bp, Homo sapiens
accccatctccttcc

SEQ ID NO: 39381 - DNA, 15 bp, Homo sapiens
ccccatctccttccc

SEQ ID NO: 39382 - DNA, 15 bp, Homo sapiens
cccatctccttccct

SEQ ID NO: 39383 - DNA, 15 bp, Homo sapiens
ccatctccttccctg

SEQ ID NO: 39384 - DNA, 15 bp, Homo sapiens
catctccttccctgg

SEQ ID NO: 39385 - DNA, 15 bp, Homo sapiens
atctccttccctggc

SEQ ID NO: 39386 - DNA, 15 bp, Homo sapiens
tctccttccctggcc

SEQ ID NO: 39387 - DNA, 15 bp, Homo sapiens
ctccttccctggccc

SEQ ID NO: 39388 - DNA, 15 bp, Homo sapiens
tccttccctggcccc

SEQ ID NO: 39389 - DNA, 15 bp, Homo sapiens
ccttccctggcccca

SEQ ID NO: 39390 - DNA, 15 bp, Homo sapiens
cttccctggccccaa

SEQ ID NO: 39391 - DNA, 15 bp, Homo sapiens
ttccctggccccaac

SEQ ID NO: 39392 - DNA, 15 bp, Homo sapiens
tccctggccccaacg

SEQ ID NO: 39393 - DNA, 15 bp, Homo sapiens
ccctggccccaacgt

SEQ ID NO: 39394 - DNA, 15 bp, Homo sapiens
cctggccccaacgta

SEQ ID NO: 39395 - DNA, 15 bp, Homo sapiens
ctggccccaacgtac

SEQ ID NO: 39396 - DNA, 15 bp, Homo sapiens
tggccccaacgtacc

SEQ ID NO: 39397 - DNA, 15 bp, Homo sapiens
ggccccaacgtaccc

SEQ ID NO: 39398 - DNA, 15 bp, Homo sapiens
gccccaacgtacccc

SEQ ID NO: 39399 - DNA, 15 bp, Homo sapiens
ccccaacgtacccca

SEQ ID NO: 39400 - DNA, 15 bp, Homo sapiens
cccaacgtaccccag

SEQ ID NO: 39401 - DNA, 15 bp, Homo sapiens
ccaacgtaccccagt

SEQ ID NO: 39402 - DNA, 15 bp, Homo sapiens
caacgtaccccagta

SEQ ID NO: 39403 - DNA, 15 bp, Homo sapiens
aacgtaccccagtat

SEQ ID NO: 39404 - DNA, 15 bp, Homo sapiens
acgtaccccagtatg

SEQ ID NO: 39405 - DNA, 15 bp, Homo sapiens
cgtaccccagtatgt

SEQ ID NO: 39406 - DNA, 15 bp, Homo sapiens
gtaccccagtatgtc

SEQ ID NO: 39407 - DNA, 15 bp, Homo sapiens
taccccagtatgtca

SEQ ID NO: 39408 - DNA, 15 bp, Homo sapiens
accccagtatgtcaa

SEQ ID NO: 39409 - DNA, 15 bp, Homo sapiens
ccccagtatgtcaat

SEQ ID NO: 39410 - DNA, 15 bp, Homo sapiens
cccagtatgtcaata

SEQ ID NO: 39411 - DNA, 15 bp, Homo sapiens
ccagtatgtcaatac

SEQ ID NO: 39412 - DNA, 15 bp, Homo sapiens
cagtatgtcaataca

SEQ ID NO: 39413 - DNA, 15 bp, Homo sapiens
agtatgtcaatacac

SEQ ID NO: 39414 - DNA, 15 bp, Homo sapiens
gtatgtcaatacacc

SEQ ID NO: 39415 - DNA, 15 bp, Homo sapiens
tatgtcaatacaccc

SEQ ID NO: 39416 - DNA, 15 bp, Homo sapiens
atgtcaatacacccc

SEQ ID NO: 39417 - DNA, 15 bp, Homo sapiens
tgtcaatacaccccc

SEQ ID NO: 39418 - DNA, 15 bp, Homo sapiens
gtcaatacaccccca

SEQ ID NO: 39419 - DNA, 15 bp, Homo sapiens
tcaatacacccccaa

SEQ ID NO: 39420 - DNA, 15 bp, Homo sapiens
caatacacccccaac

SEQ ID NO: 39421 - DNA, 15 bp, Homo sapiens
aatacacccccaact

SEQ ID NO: 39422 - DNA, 15 bp, Homo sapiens
atacacccccaactg

SEQ ID NO: 39423 - DNA, 15 bp, Homo sapiens
tacacccccaactgg

SEQ ID NO: 39424 - DNA, 15 bp, Homo sapiens
acacccccaactggg

SEQ ID NO: 39425 - DNA, 15 bp, Homo sapiens
cacccccaactgggc

SEQ ID NO: 39426 - DNA, 15 bp, Homo sapiens
acccccaactgggca

SEQ ID NO: 39427 - DNA, 15 bp, Homo sapiens
cccccaactgggcac

SEQ ID NO: 39428 - DNA, 15 bp, Homo sapiens
ccccaactgggcacc

SEQ ID NO: 39429 - DNA, 15 bp, Homo sapiens
cccaactgggcacca

SEQ ID NO: 39430 - DNA, 15 bp, Homo sapiens
ccaactgggcaccat

SEQ ID NO: 39431 - DNA, 15 bp, Homo sapiens
caactgggcaccatt

SEQ ID NO: 39432 - DNA, 15 bp, Homo sapiens
aactgggcaccattc

SEQ ID NO: 39433 - DNA, 15 bp, Homo sapiens
actgggcaccattcc

SEQ ID NO: 39434 - DNA, 15 bp, Homo sapiens
ctgggcaccattccc

SEQ ID NO: 39435 - DNA, 15 bp, Homo sapiens
tgggcaccattccca

SEQ ID NO: 39436 - DNA, 15 bp, Homo sapiens
gggcaccattcccaa

SEQ ID NO: 39437 - DNA, 15 bp, Homo sapiens
ggcaccattcccaac

SEQ ID NO: 39438 - DNA, 15 bp, Homo sapiens
gcaccattcccaacc

SEQ ID NO: 39439 - DNA, 15 bp, Homo sapiens
caccattcccaacct

SEQ ID NO: 39440 - DNA, 15 bp, Homo sapiens
accattcccaacctt

SEQ ID NO: 39441 - DNA, 15 bp, Homo sapiens
ccattcccaaccttt

SEQ ID NO: 39442 - DNA, 15 bp, Homo sapiens
cattcccaacctttc

SEQ ID NO: 39443 - DNA, 15 bp, Homo sapiens
attcccaacctttcc

SEQ ID NO: 39444 - DNA, 15 bp, Homo sapiens
ttcccaacctttcct

SEQ ID NO: 39445 - DNA, 15 bp, Homo sapiens
tcccaacctttcctt

SEQ ID NO: 39446 - DNA, 15 bp, Homo sapiens
cccaacctttccttg

SEQ ID NO: 39447 - DNA, 15 bp, Homo sapiens
ccaacctttccttgt

SEQ ID NO: 39448 - DNA, 15 bp, Homo sapiens
caacctttccttgta

SEQ ID NO: 39449 - DNA, 15 bp, Homo sapiens
aacctttccttgtaa

SEQ ID NO: 39450 - DNA, 15 bp, Homo sapiens
acctttccttgtaac

SEQ ID NO: 39451 - DNA, 15 bp, Homo sapiens
cctttccttgtaaca

SEQ ID NO: 39452 - DNA, 15 bp, Homo sapiens
ctttccttgtaacac

SEQ ID NO: 39453 - DNA, 15 bp, Homo sapiens
tttccttgtaacacc

SEQ ID NO: 39454 - DNA, 15 bp, Homo sapiens
ttccttgtaacaccc

SEQ ID NO: 39455 - DNA, 15 bp, Homo sapiens
tccttgtaacaccca

SEQ ID NO: 39456 - DNA, 15 bp, Homo sapiens
ccttgtaacacccat

SEQ ID NO: 39457 - DNA, 15 bp, Homo sapiens
cttgtaacacccatt

SEQ ID NO: 39458 - DNA, 15 bp, Homo sapiens
ttgtaacacccattt

SEQ ID NO: 39459 - DNA, 15 bp, Homo sapiens
tgtaacacccatttg

SEQ ID NO: 39460 - DNA, 15 bp, Homo sapiens
gtaacacccatttga

SEQ ID NO: 39461 - DNA, 15 bp, Homo sapiens
taacacccatttgat

SEQ ID NO: 39462 - DNA, 15 bp, Homo sapiens
aacacccatttgatc

SEQ ID NO: 39463 - DNA, 15 bp, Homo sapiens
acacccatttgatcc

SEQ ID NO: 39464 - DNA, 15 bp, Homo sapiens
cacccatttgatcct

SEQ ID NO: 39465 - DNA, 15 bp, Homo sapiens
acccatttgatcctt

SEQ ID NO: 39466 - DNA, 15 bp, Homo sapiens
cccatttgatcctta

SEQ ID NO: 39467 - DNA, 15 bp, Homo sapiens
ccatttgatccttaa

SEQ ID NO: 39468 - DNA, 15 bp, Homo sapiens
catttgatccttaac

SEQ ID NO: 39469 - DNA, 15 bp, Homo sapiens
atttgatccttaact

SEQ ID NO: 39470 - DNA, 15 bp, Homo sapiens
tttgatccttaactt

SEQ ID NO: 39471 - DNA, 15 bp, Homo sapiens
ttgatccttaacttc

SEQ ID NO: 39472 - DNA, 15 bp, Homo sapiens
tgatccttaacttca

SEQ ID NO: 39473 - DNA, 15 bp, Homo sapiens
gatccttaacttcat

SEQ ID NO: 39474 - DNA, 15 bp, Homo sapiens
atccttaacttcatc

SEQ ID NO: 39475 - DNA, 15 bp, Homo sapiens
tccttaacttcatca

SEQ ID NO: 39476 - DNA, 15 bp, Homo sapiens
ccttaacttcatcac

SEQ ID NO: 39477 - DNA, 15 bp, Homo sapiens
cttaacttcatcacc

SEQ ID NO: 39478 - DNA, 15 bp, Homo sapiens
ttaacttcatcaccc

SEQ ID NO: 39479 - DNA, 15 bp, Homo sapiens
taacttcatcacccc

SEQ ID NO: 39480 - DNA, 15 bp, Homo sapiens
aacttcatcacccca

SEQ ID NO: 39481 - DNA, 15 bp, Homo sapiens
acttcatcaccccat

SEQ ID NO: 39482 - DNA, 15 bp, Homo sapiens
cttcatcaccccatc

SEQ ID NO: 39483 - DNA, 15 bp, Homo sapiens
ttcatcaccccatcc

SEQ ID NO: 39484 - DNA, 15 bp, Homo sapiens
tcatcaccccatccc

SEQ ID NO: 39485 - DNA, 15 bp, Homo sapiens
catcaccccatccca

SEQ ID NO: 39486 - DNA, 15 bp, Homo sapiens
atcaccccatcccaa

SEQ ID NO: 39487 - DNA, 15 bp, Homo sapiens
tcaccccatcccaac

SEQ ID NO: 39488 - DNA, 15 bp, Homo sapiens
caccccatcccaact

SEQ ID NO: 39489 - DNA, 15 bp, Homo sapiens
accccatcccaactc

SEQ ID NO: 39490 - DNA, 15 bp, Homo sapiens
ccccatcccaactcc

SEQ ID NO: 39491 - DNA, 15 bp, Homo sapiens
cccatcccaactcct

SEQ ID NO: 39492 - DNA, 15 bp, Homo sapiens
ccatcccaactcctt

SEQ ID NO: 39493 - DNA, 15 bp, Homo sapiens
catcccaactccttc

SEQ ID NO: 39494 - DNA, 15 bp, Homo sapiens
atcccaactccttca

SEQ ID NO: 39495 - DNA, 15 bp, Homo sapiens
tcccaactccttcat

SEQ ID NO: 39496 - DNA, 15 bp, Homo sapiens
cccaactccttcatc

SEQ ID NO: 39497 - DNA, 15 bp, Homo sapiens
ccaactccttcatct

SEQ ID NO: 39498 - DNA, 15 bp, Homo sapiens
caactccttcatctc

SEQ ID NO: 39499 - DNA, 15 bp, Homo sapiens
aactccttcatctca

SEQ ID NO: 39500 - DNA, 15 bp, Homo sapiens
actccttcatctcag

SEQ ID NO: 39501 - DNA, 15 bp, Homo sapiens
ctccttcatctcagc

SEQ ID NO: 39502 - DNA, 15 bp, Homo sapiens
tccttcatctcagcc

SEQ ID NO: 39503 - DNA, 15 bp, Homo sapiens
ccttcatctcagcct

SEQ ID NO: 39504 - DNA, 15 bp, Homo sapiens
cttcatctcagcctc

SEQ ID NO: 39505 - DNA, 15 bp, Homo sapiens
ttcatctcagcctcc

SEQ ID NO: 39506 - DNA, 15 bp, Homo sapiens
tcatctcagcctccc

SEQ ID NO: 39507 - DNA, 15 bp, Homo sapiens
catctcagcctcccc

SEQ ID NO: 39508 - DNA, 15 bp, Homo sapiens
atctcagcctcccca

SEQ ID NO: 39509 - DNA, 15 bp, Homo sapiens
tctcagcctccccaa

SEQ ID NO: 39510 - DNA, 15 bp, Homo sapiens
ctcagcctccccaat

SEQ ID NO: 39511 - DNA, 15 bp, Homo sapiens
tcagcctccccaatg

SEQ ID NO: 39512 - DNA, 15 bp, Homo sapiens
cagcctccccaatgc

SEQ ID NO: 39513 - DNA, 15 bp, Homo sapiens
agcctccccaatgcc

SEQ ID NO: 39514 - DNA, 15 bp, Homo sapiens
gcctccccaatgcct

SEQ ID NO: 39515 - DNA, 15 bp, Homo sapiens
cctccccaatgcctt

SEQ ID NO: 39516 - DNA, 15 bp, Homo sapiens
ctccccaatgccttc

SEQ ID NO: 39517 - DNA, 15 bp, Homo sapiens
tccccaatgccttct

SEQ ID NO: 39518 - DNA, 15 bp, Homo sapiens
ccccaatgccttctc

SEQ ID NO: 39519 - DNA, 15 bp, Homo sapiens
cccaatgccttctca

SEQ ID NO: 39520 - DNA, 15 bp, Homo sapiens
ccaatgccttctcag

SEQ ID NO: 39521 - DNA, 15 bp, Homo sapiens
caatgccttctcaga

SEQ ID NO: 39522 - DNA, 15 bp, Homo sapiens
aatgccttctcagaa

SEQ ID NO: 39523 - DNA, 15 bp, Homo sapiens
atgccttctcagaac

SEQ ID NO: 39524 - DNA, 15 bp, Homo sapiens
tgccttctcagaacc

SEQ ID NO: 39525 - DNA, 15 bp, Homo sapiens
gccttctcagaacct

SEQ ID NO: 39526 - DNA, 15 bp, Homo sapiens
ccttctcagaacctt

SEQ ID NO: 39527 - DNA, 15 bp, Homo sapiens
cttctcagaaccttc

SEQ ID NO: 39528 - DNA, 15 bp, Homo sapiens
ttctcagaaccttca

SEQ ID NO: 39529 - DNA, 15 bp, Homo sapiens
tctcagaaccttcat

SEQ ID NO: 39530 - DNA, 15 bp, Homo sapiens
ctcagaaccttcatc

SEQ ID NO: 39531 - DNA, 15 bp, Homo sapiens
tcagaaccttcatcc

SEQ ID NO: 39532 - DNA, 15 bp, Homo sapiens
cagaaccttcatcct

SEQ ID NO: 39533 - DNA, 15 bp, Homo sapiens
agaaccttcatccta

SEQ ID NO: 39534 - DNA, 15 bp, Homo sapiens
gaaccttcatcctag

SEQ ID NO: 39535 - DNA, 15 bp, Homo sapiens
aaccttcatcctagc

SEQ ID NO: 39536 - DNA, 15 bp, Homo sapiens
accttcatcctagcg

SEQ ID NO: 39537 - DNA, 15 bp, Homo sapiens
ccttcatcctagcgc

SEQ ID NO: 39538 - DNA, 15 bp, Homo sapiens
cttcatcctagcgcc

SEQ ID NO: 39539 - DNA, 15 bp, Homo sapiens
ttcatcctagcgcca

SEQ ID NO: 39540 - DNA, 15 bp, Homo sapiens
tcatcctagcgccac

SEQ ID NO: 39541 - DNA, 15 bp, Homo sapiens
catcctagcgccaca

SEQ ID NO: 39542 - DNA, 15 bp, Homo sapiens
atcctagcgccacac

SEQ ID NO: 39543 - DNA, 15 bp, Homo sapiens
tcctagcgccacacc

SEQ ID NO: 39544 - DNA, 15 bp, Homo sapiens
cctagcgccacacct

SEQ ID NO: 39545 - DNA, 15 bp, Homo sapiens
ctagcgccacaccta

SEQ ID NO: 39546 - DNA, 15 bp, Homo sapiens
tagcgccacacctaa

SEQ ID NO: 39547 - DNA, 15 bp, Homo sapiens
agcgccacacctaac

SEQ ID NO: 39548 - DNA, 15 bp, Homo sapiens
gcgccacacctaacc

SEQ ID NO: 39549 - DNA, 15 bp, Homo sapiens
cgccacacctaaccc

SEQ ID NO: 39550 - DNA, 15 bp, Homo sapiens
gccacacctaacccc

SEQ ID NO: 39551 - DNA, 15 bp, Homo sapiens
ccacacctaacccca

SEQ ID NO: 39552 - DNA, 15 bp, Homo sapiens
cacacctaaccccaa

SEQ ID NO: 39553 - DNA, 15 bp, Homo sapiens
acacctaaccccaaa

SEQ ID NO: 39554 - DNA, 15 bp, Homo sapiens
cacctaaccccaaac

SEQ ID NO: 39555 - DNA, 15 bp, Homo sapiens
acctaaccccaaacc

SEQ ID NO: 39556 - DNA, 15 bp, Homo sapiens
cctaaccccaaacct

SEQ ID NO: 39557 - DNA, 15 bp, Homo sapiens
ctaaccccaaacctg

SEQ ID NO: 39558 - DNA, 15 bp, Homo sapiens
taaccccaaacctga

SEQ ID NO: 39559 - DNA, 15 bp, Homo sapiens
aaccccaaacctgaa

SEQ ID NO: 39560 - DNA, 15 bp, Homo sapiens
accccaaacctgaac

SEQ ID NO: 39561 - DNA, 15 bp, Homo sapiens
ccccaaacctgaacc

SEQ ID NO: 39562 - DNA, 15 bp, Homo sapiens
cccaaacctgaacct

SEQ ID NO: 39563 - DNA, 15 bp, Homo sapiens
ccaaacctgaacctc

SEQ ID NO: 39564 - DNA, 15 bp, Homo sapiens
caaacctgaacctca

SEQ ID NO: 39565 - DNA, 15 bp, Homo sapiens
aaacctgaacctcac

SEQ ID NO: 39566 - DNA, 15 bp, Homo sapiens
aacctgaacctcacc

SEQ ID NO: 39567 - DNA, 15 bp, Homo sapiens
acctgaacctcaccc

SEQ ID NO: 39568 - DNA, 15 bp, Homo sapiens
cctgaacctcacccc

SEQ ID NO: 39569 - DNA, 15 bp, Homo sapiens
ctgaacctcacccct

SEQ ID NO: 39570 - DNA, 15 bp, Homo sapiens
tgaacctcaccccta

SEQ ID NO: 39571 - DNA, 15 bp, Homo sapiens
gaacctcacccctac

SEQ ID NO: 39572 - DNA, 15 bp, Homo sapiens
aacctcacccctaca

SEQ ID NO: 39573 - DNA, 15 bp, Homo sapiens
acctcacccctacat

SEQ ID NO: 39574 - DNA, 15 bp, Homo sapiens
cctcacccctacatg

SEQ ID NO: 39575 - DNA, 15 bp, Homo sapiens
ctcacccctacatga

SEQ ID NO: 39576 - DNA, 15 bp, Homo sapiens
tcacccctacatgat

SEQ ID NO: 39577 - DNA, 15 bp, Homo sapiens
cacccctacatgata

SEQ ID NO: 39578 - DNA, 15 bp, Homo sapiens
acccctacatgatac

SEQ ID NO: 39579 - DNA, 15 bp, Homo sapiens
cccctacatgatacc

SEQ ID NO: 39580 - DNA, 15 bp, Homo sapiens
ccctacatgatacca

SEQ ID NO: 39581 - DNA, 15 bp, Homo sapiens
cctacatgataccag

SEQ ID NO: 39582 - DNA, 15 bp, Homo sapiens
ctacatgataccaga

SEQ ID NO: 39583 - DNA, 15 bp, Homo sapiens
tacatgataccagat

SEQ ID NO: 39584 - DNA, 15 bp, Homo sapiens
acatgataccagata

SEQ ID NO: 39585 - DNA, 15 bp, Homo sapiens
catgataccagatat

SEQ ID NO: 39586 - DNA, 15 bp, Homo sapiens
atgataccagatatt

SEQ ID NO: 39587 - DNA, 15 bp, Homo sapiens
tgataccagatattc

SEQ ID NO: 39588 - DNA, 15 bp, Homo sapiens
gataccagatattcc

SEQ ID NO: 39589 - DNA, 15 bp, Homo sapiens
ataccagatattccc

SEQ ID NO: 39590 - DNA, 15 bp, Homo sapiens
taccagatattcccc

SEQ ID NO: 39591 - DNA, 15 bp, Homo sapiens
accagatattccccg

SEQ ID NO: 39592 - DNA, 15 bp, Homo sapiens
ccagatattccccga

SEQ ID NO: 39593 - DNA, 15 bp, Homo sapiens
cagatattccccgac

SEQ ID NO: 39594 - DNA, 15 bp, Homo sapiens
agatattccccgact

SEQ ID NO: 39595 - DNA, 15 bp, Homo sapiens
gatattccccgactg

SEQ ID NO: 39596 - DNA, 15 bp, Homo sapiens
atattccccgactgt

SEQ ID NO: 39597 - DNA, 15 bp, Homo sapiens
tattccccgactgtc

SEQ ID NO: 39598 - DNA, 15 bp, Homo sapiens
attccccgactgtct

SEQ ID NO: 39599 - DNA, 15 bp, Homo sapiens
ttccccgactgtctc

SEQ ID NO: 39600 - DNA, 15 bp, Homo sapiens
tccccgactgtctct

SEQ ID NO: 39601 - DNA, 15 bp, Homo sapiens
ccccgactgtctctg

SEQ ID NO: 39602 - DNA, 15 bp, Homo sapiens
cccgactgtctctga

SEQ ID NO: 39603 - DNA, 15 bp, Homo sapiens
ccgactgtctctgaa

SEQ ID NO: 39604 - DNA, 15 bp, Homo sapiens
cgactgtctctgaac

SEQ ID NO: 39605 - DNA, 15 bp, Homo sapiens
gactgtctctgaact

SEQ ID NO: 39606 - DNA, 15 bp, Homo sapiens
actgtctctgaactg

SEQ ID NO: 39607 - DNA, 15 bp, Homo sapiens
ctgtctctgaactga

SEQ ID NO: 39608 - DNA, 15 bp, Homo sapiens
tgtctctgaactgaa

SEQ ID NO: 39609 - DNA, 15 bp, Homo sapiens
gtctctgaactgaaa

SEQ ID NO: 39610 - DNA, 15 bp, Homo sapiens
tctctgaactgaaac

SEQ ID NO: 39611 - DNA, 15 bp, Homo sapiens
ctctgaactgaaacc

SEQ ID NO: 39612 - DNA, 15 bp, Homo sapiens
tctgaactgaaaccc

SEQ ID NO: 39613 - DNA, 15 bp, Homo sapiens
ctgaactgaaaccct

SEQ ID NO: 39614 - DNA, 15 bp, Homo sapiens
tgaactgaaaccctg

SEQ ID NO: 39615 - DNA, 15 bp, Homo sapiens
gaactgaaaccctga

SEQ ID NO: 39616 - DNA, 15 bp, Homo sapiens
aactgaaaccctgac

SEQ ID NO: 39617 - DNA, 15 bp, Homo sapiens
actgaaaccctgacc

SEQ ID NO: 39618 - DNA, 15 bp, Homo sapiens
ctgaaaccctgacct

SEQ ID NO: 39619 - DNA, 15 bp, Homo sapiens
tgaaaccctgaccta

SEQ ID NO: 39620 - DNA, 15 bp, Homo sapiens
gaaaccctgacctag

SEQ ID NO: 39621 - DNA, 15 bp, Homo sapiens
aaaccctgacctagc

SEQ ID NO: 39622 - DNA, 15 bp, Homo sapiens
aaccctgacctagcc

SEQ ID NO: 39623 - DNA, 15 bp, Homo sapiens
accctgacctagccc

SEQ ID NO: 39624 - DNA, 15 bp, Homo sapiens
ccctgacctagcccc

SEQ ID NO: 39625 - DNA, 15 bp, Homo sapiens
cctgacctagcccca

SEQ ID NO: 39626 - DNA, 15 bp, Homo sapiens
ctgacctagccccat

SEQ ID NO: 39627 - DNA, 15 bp, Homo sapiens
tgacctagccccatc

SEQ ID NO: 39628 - DNA, 15 bp, Homo sapiens
gacctagccccatcc

SEQ ID NO: 39629 - DNA, 15 bp, Homo sapiens
acctagccccatcct

SEQ ID NO: 39630 - DNA, 15 bp, Homo sapiens
cctagccccatcctg

SEQ ID NO: 39631 - DNA, 15 bp, Homo sapiens
ctagccccatcctga

SEQ ID NO: 39632 - DNA, 15 bp, Homo sapiens
tagccccatcctgac

SEQ ID NO: 39633 - DNA, 15 bp, Homo sapiens
agccccatcctgact

SEQ ID NO: 39634 - DNA, 15 bp, Homo sapiens
gccccatcctgactg

SEQ ID NO: 39635 - DNA, 15 bp, Homo sapiens
ccccatcctgactga

SEQ ID NO: 39636 - DNA, 15 bp, Homo sapiens
cccatcctgactgat

SEQ ID NO: 39637 - DNA, 15 bp, Homo sapiens
ccatcctgactgata

SEQ ID NO: 39638 - DNA, 15 bp, Homo sapiens
catcctgactgatag

SEQ ID NO: 39639 - DNA, 15 bp, Homo sapiens
atcctgactgatagc

SEQ ID NO: 39640 - DNA, 15 bp, Homo sapiens
tcctgactgatagcc

SEQ ID NO: 39641 - DNA, 15 bp, Homo sapiens
cctgactgatagcct

SEQ ID NO: 39642 - DNA, 15 bp, Homo sapiens
ctgactgatagcctc

SEQ ID NO: 39643 - DNA, 15 bp, Homo sapiens
tgactgatagcctca

SEQ ID NO: 39644 - DNA, 15 bp, Homo sapiens
gactgatagcctcac

SEQ ID NO: 39645 - DNA, 15 bp, Homo sapiens
actgatagcctcact

SEQ ID NO: 39646 - DNA, 15 bp, Homo sapiens
ctgatagcctcactg

SEQ ID NO: 39647 - DNA, 15 bp, Homo sapiens
tgatagcctcactgc

SEQ ID NO: 39648 - DNA, 15 bp, Homo sapiens
gatagcctcactgca

SEQ ID NO: 39649 - DNA, 15 bp, Homo sapiens
atagcctcactgcaa

SEQ ID NO: 39650 - DNA, 15 bp, Homo sapiens
tagcctcactgcaat

SEQ ID NO: 39651 - DNA, 15 bp, Homo sapiens
agcctcactgcaatc

SEQ ID NO: 39652 - DNA, 15 bp, Homo sapiens
gcctcactgcaatca

SEQ ID NO: 39653 - DNA, 15 bp, Homo sapiens
cctcactgcaatcat

SEQ ID NO: 39654 - DNA, 15 bp, Homo sapiens
ctcactgcaatcatc

SEQ ID NO: 39655 - DNA, 15 bp, Homo sapiens
tcactgcaatcatca

SEQ ID NO: 39656 - DNA, 15 bp, Homo sapiens
cactgcaatcatcat

SEQ ID NO: 39657 - DNA, 15 bp, Homo sapiens
actgcaatcatcatc

SEQ ID NO: 39658 - DNA, 15 bp, Homo sapiens
ctgcaatcatcatcg

SEQ ID NO: 39659 - DNA, 15 bp, Homo sapiens
tgcaatcatcatcgc

SEQ ID NO: 39660 - DNA, 15 bp, Homo sapiens
gcaatcatcatcgct

SEQ ID NO: 39661 - DNA, 15 bp, Homo sapiens
caatcatcatcgctg

SEQ ID NO: 39662 - DNA, 15 bp, Homo sapiens
aatcatcatcgctga

SEQ ID NO: 39663 - DNA, 15 bp, Homo sapiens
atcatcatcgctgac

SEQ ID NO: 39664 - DNA, 15 bp, Homo sapiens
tcatcatcgctgact

SEQ ID NO: 39665 - DNA, 15 bp, Homo sapiens
catcatcgctgactc

SEQ ID NO: 39666 - DNA, 15 bp, Homo sapiens
atcatcgctgactct

SEQ ID NO: 39667 - DNA, 15 bp, Homo sapiens
tcatcgctgactctg

SEQ ID NO: 39668 - DNA, 15 bp, Homo sapiens
catcgctgactctgt

SEQ ID NO: 39669 - DNA, 15 bp, Homo sapiens
atcgctgactctgta

SEQ ID NO: 39670 - DNA, 15 bp, Homo sapiens
tcgctgactctgtaa

SEQ ID NO: 39671 - DNA, 15 bp, Homo sapiens
cgctgactctgtaat

SEQ ID NO: 39672 - DNA, 15 bp, Homo sapiens
gctgactctgtaatc

SEQ ID NO: 39673 - DNA, 15 bp, Homo sapiens
ctgactctgtaatcc

SEQ ID NO: 39674 - DNA, 15 bp, Homo sapiens
tgactctgtaatccc

SEQ ID NO: 39675 - DNA, 15 bp, Homo sapiens
gactctgtaatccca

SEQ ID NO: 39676 - DNA, 15 bp, Homo sapiens
actctgtaatcccat

SEQ ID NO: 39677 - DNA, 15 bp, Homo sapiens
ctctgtaatcccatt

SEQ ID NO: 39678 - DNA, 15 bp, Homo sapiens
tctgtaatcccattc

SEQ ID NO: 39679 - DNA, 15 bp, Homo sapiens
ctgtaatcccattcc

SEQ ID NO: 39680 - DNA, 15 bp, Homo sapiens
tgtaatcccattcct

SEQ ID NO: 39681 - DNA, 15 bp, Homo sapiens
gtaatcccattcctg

SEQ ID NO: 39682 - DNA, 15 bp, Homo sapiens
taatcccattcctga

SEQ ID NO: 39683 - DNA, 15 bp, Homo sapiens
aatcccattcctgaa

SEQ ID NO: 39684 - DNA, 15 bp, Homo sapiens
atcccattcctgaat

SEQ ID NO: 39685 - DNA, 15 bp, Homo sapiens
tcccattcctgaatc

SEQ ID NO: 39686 - DNA, 15 bp, Homo sapiens
cccattcctgaatcc

SEQ ID NO: 39687 - DNA, 15 bp, Homo sapiens
ccattcctgaatcca

SEQ ID NO: 39688 - DNA, 15 bp, Homo sapiens
cattcctgaatccaa

SEQ ID NO: 39689 - DNA, 15 bp, Homo sapiens
attcctgaatccaaa

SEQ ID NO: 39690 - DNA, 15 bp, Homo sapiens
ttcctgaatccaaac

SEQ ID NO: 39691 - DNA, 15 bp, Homo sapiens
tcctgaatccaaact

SEQ ID NO: 39692 - DNA, 15 bp, Homo sapiens
cctgaatccaaactg

SEQ ID NO: 39693 - DNA, 15 bp, Homo sapiens
ctgaatccaaactga

SEQ ID NO: 39694 - DNA, 15 bp, Homo sapiens
tgaatccaaactgat

SEQ ID NO: 39695 - DNA, 15 bp, Homo sapiens
gaatccaaactgatc

SEQ ID NO: 39696 - DNA, 15 bp, Homo sapiens
aatccaaactgatca

SEQ ID NO: 39697 - DNA, 15 bp, Homo sapiens
atccaaactgatcaa

SEQ ID NO: 39698 - DNA, 15 bp, Homo sapiens
tccaaactgatcaaa

SEQ ID NO: 39699 - DNA, 15 bp, Homo sapiens
ccaaactgatcaaat

SEQ ID NO: 39700 - DNA, 15 bp, Homo sapiens
caaactgatcaaatt

SEQ ID NO: 39701 - DNA, 15 bp, Homo sapiens
aaactgatcaaattc

SEQ ID NO: 39702 - DNA, 15 bp, Homo sapiens
aactgatcaaattcc

SEQ ID NO: 39703 - DNA, 15 bp, Homo sapiens
actgatcaaattccc

SEQ ID NO: 39704 - DNA, 15 bp, Homo sapiens
ctgatcaaattccct

SEQ ID NO: 39705 - DNA, 15 bp, Homo sapiens
tgatcaaattccctg

SEQ ID NO: 39706 - DNA, 15 bp, Homo sapiens
gatcaaattccctga

SEQ ID NO: 39707 - DNA, 15 bp, Homo sapiens
atcaaattccctgac

SEQ ID NO: 39708 - DNA, 15 bp, Homo sapiens
tcaaattccctgacc

SEQ ID NO: 39709 - DNA, 15 bp, Homo sapiens
caaattccctgaccc

SEQ ID NO: 39710 - DNA, 15 bp, Homo sapiens
aaattccctgaccct

SEQ ID NO: 39711 - DNA, 15 bp, Homo sapiens
aattccctgaccctc

SEQ ID NO: 39712 - DNA, 15 bp, Homo sapiens
attccctgaccctca

SEQ ID NO: 39713 - DNA, 15 bp, Homo sapiens
ttccctgaccctcag

SEQ ID NO: 39714 - DNA, 15 bp, Homo sapiens
tccctgaccctcagc

SEQ ID NO: 39715 - DNA, 15 bp, Homo sapiens
ccctgaccctcagcc

SEQ ID NO: 39716 - DNA, 15 bp, Homo sapiens
cctgaccctcagcct

SEQ ID NO: 39717 - DNA, 15 bp, Homo sapiens
ctgaccctcagcctc

SEQ ID NO: 39718 - DNA, 15 bp, Homo sapiens
tgaccctcagcctca

SEQ ID NO: 39719 - DNA, 15 bp, Homo sapiens
gaccctcagcctcac

SEQ ID NO: 39720 - DNA, 15 bp, Homo sapiens
accctcagcctcact

SEQ ID NO: 39721 - DNA, 15 bp, Homo sapiens
ccctcagcctcactc

SEQ ID NO: 39722 - DNA, 15 bp, Homo sapiens
cctcagcctcactcc

SEQ ID NO: 39723 - DNA, 15 bp, Homo sapiens
ctcagcctcactcca

SEQ ID NO: 39724 - DNA, 15 bp, Homo sapiens
tcagcctcactccac

SEQ ID NO: 39725 - DNA, 15 bp, Homo sapiens
cagcctcactccaca

SEQ ID NO: 39726 - DNA, 15 bp, Homo sapiens
agcctcactccacac

SEQ ID NO: 39727 - DNA, 15 bp, Homo sapiens
gcctcactccacacc

SEQ ID NO: 39728 - DNA, 15 bp, Homo sapiens
cctcactccacaccg

SEQ ID NO: 39729 - DNA, 15 bp, Homo sapiens
ctcactccacaccga

SEQ ID NO: 39730 - DNA, 15 bp, Homo sapiens
tcactccacaccgaa

SEQ ID NO: 39731 - DNA, 15 bp, Homo sapiens
cactccacaccgaac

SEQ ID NO: 39732 - DNA, 15 bp, Homo sapiens
actccacaccgaacc

SEQ ID NO: 39733 - DNA, 15 bp, Homo sapiens
ctccacaccgaaccc

SEQ ID NO: 39734 - DNA, 15 bp, Homo sapiens
tccacaccgaacccc

SEQ ID NO: 39735 - DNA, 15 bp, Homo sapiens
ccacaccgaacccca

SEQ ID NO: 39736 - DNA, 15 bp, Homo sapiens
cacaccgaaccccac

SEQ ID NO: 39737 - DNA, 15 bp, Homo sapiens
acaccgaaccccaca

SEQ ID NO: 39738 - DNA, 15 bp, Homo sapiens
caccgaaccccacaa

SEQ ID NO: 39739 - DNA, 15 bp, Homo sapiens
accgaaccccacaac

SEQ ID NO: 39740 - DNA, 15 bp, Homo sapiens
ccgaaccccacaact

SEQ ID NO: 39741 - DNA, 15 bp, Homo sapiens
cgaaccccacaacta

SEQ ID NO: 39742 - DNA, 15 bp, Homo sapiens
gaaccccacaactaa

SEQ ID NO: 39743 - DNA, 15 bp, Homo sapiens
aaccccacaactaac

SEQ ID NO: 39744 - DNA, 15 bp, Homo sapiens
accccacaactaacc

SEQ ID NO: 39745 - DNA, 15 bp, Homo sapiens
ccccacaactaacct

SEQ ID NO: 39746 - DNA, 15 bp, Homo sapiens
cccacaactaacctc

SEQ ID NO: 39747 - DNA, 15 bp, Homo sapiens
ccacaactaacctca

SEQ ID NO: 39748 - DNA, 15 bp, Homo sapiens
cacaactaacctcat

SEQ ID NO: 39749 - DNA, 15 bp, Homo sapiens
acaactaacctcatc

SEQ ID NO: 39750 - DNA, 15 bp, Homo sapiens
caactaacctcatcc

SEQ ID NO: 39751 - DNA, 15 bp, Homo sapiens
aactaacctcatcct

SEQ ID NO: 39752 - DNA, 15 bp, Homo sapiens
actaacctcatcctt

SEQ ID NO: 39753 - DNA, 15 bp, Homo sapiens
ctaacctcatccttg

SEQ ID NO: 39754 - DNA, 15 bp, Homo sapiens
taacctcatccttgc

SEQ ID NO: 39755 - DNA, 15 bp, Homo sapiens
aacctcatccttgcc

SEQ ID NO: 39756 - DNA, 15 bp, Homo sapiens
acctcatccttgccc

SEQ ID NO: 39757 - DNA, 15 bp, Homo sapiens
cctcatccttgccct

SEQ ID NO: 39758 - DNA, 15 bp, Homo sapiens
ctcatccttgccctg

SEQ ID NO: 39759 - DNA, 15 bp, Homo sapiens
tcatccttgccctga

SEQ ID NO: 39760 - DNA, 15 bp, Homo sapiens
catccttgccctgag

SEQ ID NO: 39761 - DNA, 15 bp, Homo sapiens
atccttgccctgagc

SEQ ID NO: 39762 - DNA, 15 bp, Homo sapiens
tccttgccctgagcc

SEQ ID NO: 39763 - DNA, 15 bp, Homo sapiens
ccttgccctgagcct

SEQ ID NO: 39764 - DNA, 15 bp, Homo sapiens
cttgccctgagccta

SEQ ID NO: 39765 - DNA, 15 bp, Homo sapiens
ttgccctgagcctaa

SEQ ID NO: 39766 - DNA, 15 bp, Homo sapiens
tgccctgagcctaac

SEQ ID NO: 39767 - DNA, 15 bp, Homo sapiens
gccctgagcctaacc

SEQ ID NO: 39768 - DNA, 15 bp, Homo sapiens
ccctgagcctaacca

SEQ ID NO: 39769 - DNA, 15 bp, Homo sapiens
cctgagcctaaccac

SEQ ID NO: 39770 - DNA, 15 bp, Homo sapiens
ctgagcctaaccacc

SEQ ID NO: 39771 - DNA, 15 bp, Homo sapiens
tgagcctaaccacct

SEQ ID NO: 39772 - DNA, 15 bp, Homo sapiens
gagcctaaccaccta

SEQ ID NO: 39773 - DNA, 15 bp, Homo sapiens
agcctaaccacctaa

SEQ ID NO: 39774 - DNA, 15 bp, Homo sapiens
gcctaaccacctaac

SEQ ID NO: 39775 - DNA, 15 bp, Homo sapiens
cctaaccacctaacc

SEQ ID NO: 39776 - DNA, 15 bp, Homo sapiens
ctaaccacctaacca

SEQ ID NO: 39777 - DNA, 15 bp, Homo sapiens
taaccacctaaccat

SEQ ID NO: 39778 - DNA, 15 bp, Homo sapiens
aaccacctaaccatg

SEQ ID NO: 39779 - DNA, 15 bp, Homo sapiens
accacctaaccatgt

SEQ ID NO: 39780 - DNA, 15 bp, Homo sapiens
ccacctaaccatgtc

SEQ ID NO: 39781 - DNA, 15 bp, Homo sapiens
cacctaaccatgtcc

SEQ ID NO: 39782 - DNA, 15 bp, Homo sapiens
acctaaccatgtccc

SEQ ID NO: 39783 - DNA, 15 bp, Homo sapiens
cctaaccatgtccct

SEQ ID NO: 39784 - DNA, 15 bp, Homo sapiens
ctaaccatgtccctg

SEQ ID NO: 39785 - DNA, 15 bp, Homo sapiens
taaccatgtccctga

SEQ ID NO: 39786 - DNA, 15 bp, Homo sapiens
aaccatgtccctgac

SEQ ID NO: 39787 - DNA, 15 bp, Homo sapiens
accatgtccctgaca

SEQ ID NO: 39788 - DNA, 15 bp, Homo sapiens
ccatgtccctgacac

SEQ ID NO: 39789 - DNA, 15 bp, Homo sapiens
catgtccctgacacg

SEQ ID NO: 39790 - DNA, 15 bp, Homo sapiens
atgtccctgacacgt

SEQ ID NO: 39791 - DNA, 15 bp, Homo sapiens
tgtccctgacacgta

SEQ ID NO: 39792 - DNA, 15 bp, Homo sapiens
gtccctgacacgtaa

SEQ ID NO: 39793 - DNA, 15 bp, Homo sapiens
tccctgacacgtaag

SEQ ID NO: 39794 - DNA, 15 bp, Homo sapiens
ccctgacacgtaaga

SEQ ID NO: 39795 - DNA, 15 bp, Homo sapiens
cctgacacgtaagat

SEQ ID NO: 39796 - DNA, 15 bp, Homo sapiens
ctgacacgtaagata

SEQ ID NO: 39797 - DNA, 15 bp, Homo sapiens
tgacacgtaagatac

SEQ ID NO: 39798 - DNA, 15 bp, Homo sapiens
gacacgtaagatact

SEQ ID NO: 39799 - DNA, 15 bp, Homo sapiens
acacgtaagatactc

SEQ ID NO: 39800 - DNA, 15 bp, Homo sapiens
cacgtaagatactcg

SEQ ID NO: 39801 - DNA, 15 bp, Homo sapiens
acgtaagatactcga

SEQ ID NO: 39802 - DNA, 15 bp, Homo sapiens
cgtaagatactcgat

SEQ ID NO: 39803 - DNA, 15 bp, Homo sapiens
gtaagatactcgata

SEQ ID NO: 39804 - DNA, 15 bp, Homo sapiens
taagatactcgataa

SEQ ID NO: 39805 - DNA, 15 bp, Homo sapiens
aagatactcgataat

SEQ ID NO: 39806 - DNA, 15 bp, Homo sapiens
agatactcgataatt

SEQ ID NO: 39807 - DNA, 15 bp, Homo sapiens
gatactcgataattc

SEQ ID NO: 39808 - DNA, 15 bp, Homo sapiens
atactcgataattca

SEQ ID NO: 39809 - DNA, 15 bp, Homo sapiens
tactcgataattcaa

SEQ ID NO: 39810 - DNA, 15 bp, Homo sapiens
actcgataattcaaa

SEQ ID NO: 39811 - DNA, 15 bp, Homo sapiens
ctcgataattcaaac

SEQ ID NO: 39812 - DNA, 15 bp, Homo sapiens
tcgataattcaaacc

SEQ ID NO: 39813 - DNA, 15 bp, Homo sapiens
cgataattcaaacca

SEQ ID NO: 39814 - DNA, 15 bp, Homo sapiens
gataattcaaaccat

SEQ ID NO: 39815 - DNA, 15 bp, Homo sapiens
ataattcaaaccatc

SEQ ID NO: 39816 - DNA, 15 bp, Homo sapiens
taattcaaaccatct

SEQ ID NO: 39817 - DNA, 15 bp, Homo sapiens
aattcaaaccatctc

SEQ ID NO: 39818 - DNA, 15 bp, Homo sapiens
attcaaaccatctct

SEQ ID NO: 39819 - DNA, 15 bp, Homo sapiens
ttcaaaccatctctg

SEQ ID NO: 39820 - DNA, 15 bp, Homo sapiens
tcaaaccatctctgg

SEQ ID NO: 39821 - DNA, 15 bp, Homo sapiens
caaaccatctctggc

SEQ ID NO: 39822 - DNA, 15 bp, Homo sapiens
aaaccatctctggct

SEQ ID NO: 39823 - DNA, 15 bp, Homo sapiens
aaccatctctggctt

SEQ ID NO: 39824 - DNA, 15 bp, Homo sapiens
accatctctggcttc

SEQ ID NO: 39825 - DNA, 15 bp, Homo sapiens
ccatctctggcttct

SEQ ID NO: 39826 - DNA, 15 bp, Homo sapiens
catctctggcttctg

SEQ ID NO: 39827 - DNA, 15 bp, Homo sapiens
atctctggcttctga

SEQ ID NO: 39828 - DNA, 15 bp, Homo sapiens
tctctggcttctgac

SEQ ID NO: 39829 - DNA, 15 bp, Homo sapiens
ctctggcttctgacc

SEQ ID NO: 39830 - DNA, 15 bp, Homo sapiens
tctggcttctgacct

SEQ ID NO: 39831 - DNA, 15 bp, Homo sapiens
ctggcttctgaccta

SEQ ID NO: 39832 - DNA, 15 bp, Homo sapiens
tggcttctgacctaa

SEQ ID NO: 39833 - DNA, 15 bp, Homo sapiens
ggcttctgacctaaa

SEQ ID NO: 39834 - DNA, 15 bp, Homo sapiens
gcttctgacctaaag

SEQ ID NO: 39835 - DNA, 15 bp, Homo sapiens
cttctgacctaaagc

SEQ ID NO: 39836 - DNA, 15 bp, Homo sapiens
ttctgacctaaagcc

SEQ ID NO: 39837 - DNA, 15 bp, Homo sapiens
tctgacctaaagcca

SEQ ID NO: 39838 - DNA, 15 bp, Homo sapiens
ctgacctaaagccaa

SEQ ID NO: 39839 - DNA, 15 bp, Homo sapiens
tgacctaaagccaag

SEQ ID NO: 39840 - DNA, 15 bp, Homo sapiens
gacctaaagccaagt

SEQ ID NO: 39841 - DNA, 15 bp, Homo sapiens
acctaaagccaagtc

SEQ ID NO: 39842 - DNA, 15 bp, Homo sapiens
cctaaagccaagtca

SEQ ID NO: 39843 - DNA, 15 bp, Homo sapiens
ctaaagccaagtcat

SEQ ID NO: 39844 - DNA, 15 bp, Homo sapiens
taaagccaagtcatc

SEQ ID NO: 39845 - DNA, 15 bp, Homo sapiens
aaagccaagtcatcc

SEQ ID NO: 39846 - DNA, 15 bp, Homo sapiens
aagccaagtcatccc

SEQ ID NO: 39847 - DNA, 15 bp, Homo sapiens
agccaagtcatccca

SEQ ID NO: 39848 - DNA, 15 bp, Homo sapiens
gccaagtcatcccat

SEQ ID NO: 39849 - DNA, 15 bp, Homo sapiens
ccaagtcatcccatc

SEQ ID NO: 39850 - DNA, 15 bp, Homo sapiens
caagtcatcccatcc

SEQ ID NO: 39851 - DNA, 15 bp, Homo sapiens
aagtcatcccatccc

SEQ ID NO: 39852 - DNA, 15 bp, Homo sapiens
agtcatcccatccct

SEQ ID NO: 39853 - DNA, 15 bp, Homo sapiens
gtcatcccatccctc

SEQ ID NO: 39854 - DNA, 15 bp, Homo sapiens
tcatcccatccctca

SEQ ID NO: 39855 - DNA, 15 bp, Homo sapiens
catcccatccctcac

SEQ ID NO: 39856 - DNA, 15 bp, Homo sapiens
atcccatccctcacc

SEQ ID NO: 39857 - DNA, 15 bp, Homo sapiens
tcccatccctcaccc

SEQ ID NO: 39858 - DNA, 15 bp, Homo sapiens
cccatccctcacccc

SEQ ID NO: 39859 - DNA, 15 bp, Homo sapiens
ccatccctcacccct

SEQ ID NO: 39860 - DNA, 15 bp, Homo sapiens
catccctcaccccta

SEQ ID NO: 39861 - DNA, 15 bp, Homo sapiens
atccctcacccctag

SEQ ID NO: 39862 - DNA, 15 bp, Homo sapiens
tccctcacccctaga

SEQ ID NO: 39863 - DNA, 15 bp, Homo sapiens
ccctcacccctagac

SEQ ID NO: 39864 - DNA, 15 bp, Homo sapiens
cctcacccctagacc

SEQ ID NO: 39865 - DNA, 15 bp, Homo sapiens
ctcacccctagaccc

SEQ ID NO: 39866 - DNA, 15 bp, Homo sapiens
tcacccctagacccc

SEQ ID NO: 39867 - DNA, 15 bp, Homo sapiens
cacccctagaccccc

SEQ ID NO: 39868 - DNA, 15 bp, Homo sapiens
acccctagacccccc

SEQ ID NO: 39869 - DNA, 15 bp, Homo sapiens
cccctagacccccca

SEQ ID NO: 39870 - DNA, 15 bp, Homo sapiens
ccctagaccccccac

SEQ ID NO: 39871 - DNA, 15 bp, Homo sapiens
cctagaccccccacc

SEQ ID NO: 39872 - DNA, 15 bp, Homo sapiens
ctagaccccccacct

SEQ ID NO: 39873 - DNA, 15 bp, Homo sapiens
tagaccccccacctg

SEQ ID NO: 39874 - DNA, 15 bp, Homo sapiens
agaccccccacctga

SEQ ID NO: 39875 - DNA, 15 bp, Homo sapiens
gaccccccacctgag

SEQ ID NO: 39876 - DNA, 15 bp, Homo sapiens
accccccacctgagt

SEQ ID NO: 39877 - DNA, 15 bp, Homo sapiens
ccccccacctgagtc

SEQ ID NO: 39878 - DNA, 15 bp, Homo sapiens
cccccacctgagtcc

SEQ ID NO: 39879 - DNA, 15 bp, Homo sapiens
ccccacctgagtcca

SEQ ID NO: 39880 - DNA, 15 bp, Homo sapiens
cccacctgagtccac

SEQ ID NO: 39881 - DNA, 15 bp, Homo sapiens
ccacctgagtccacc

SEQ ID NO: 39882 - DNA, 15 bp, Homo sapiens
cacctgagtccaccc

SEQ ID NO: 39883 - DNA, 15 bp, Homo sapiens
acctgagtccacccc

SEQ ID NO: 39884 - DNA, 15 bp, Homo sapiens
cctgagtccacccca

SEQ ID NO: 39885 - DNA, 15 bp, Homo sapiens
ctgagtccaccccag

SEQ ID NO: 39886 - DNA, 15 bp, Homo sapiens
tgagtccaccccagc

SEQ ID NO: 39887 - DNA, 15 bp, Homo sapiens
gagtccaccccagcc

SEQ ID NO: 39888 - DNA, 15 bp, Homo sapiens
agtccaccccagcct

SEQ ID NO: 39889 - DNA, 15 bp, Homo sapiens
gtccaccccagcctg

SEQ ID NO: 39890 - DNA, 15 bp, Homo sapiens
tccaccccagcctga

SEQ ID NO: 39891 - DNA, 15 bp, Homo sapiens
ccaccccagcctgac

SEQ ID NO: 39892 - DNA, 15 bp, Homo sapiens
caccccagcctgact

SEQ ID NO: 39893 - DNA, 15 bp, Homo sapiens
accccagcctgactc

SEQ ID NO: 39894 - DNA, 15 bp, Homo sapiens
ccccagcctgactct

SEQ ID NO: 39895 - DNA, 15 bp, Homo sapiens
cccagcctgactctt

SEQ ID NO: 39896 - DNA, 15 bp, Homo sapiens
ccagcctgactctta

SEQ ID NO: 39897 - DNA, 15 bp, Homo sapiens
cagcctgactcttaa

SEQ ID NO: 39898 - DNA, 15 bp, Homo sapiens
agcctgactcttaac

SEQ ID NO: 39899 - DNA, 15 bp, Homo sapiens
gcctgactcttaacc

SEQ ID NO: 39900 - DNA, 15 bp, Homo sapiens
cctgactcttaaccc

SEQ ID NO: 39901 - DNA, 15 bp, Homo sapiens
ctgactcttaaccca

SEQ ID NO: 39902 - DNA, 15 bp, Homo sapiens
tgactcttaacccac

SEQ ID NO: 39903 - DNA, 15 bp, Homo sapiens
gactcttaacccacc

SEQ ID NO: 39904 - DNA, 15 bp, Homo sapiens
actcttaacccaccc

SEQ ID NO: 39905 - DNA, 15 bp, Homo sapiens
ctcttaacccacccc

SEQ ID NO: 39906 - DNA, 15 bp, Homo sapiens
tcttaacccacccct

SEQ ID NO: 39907 - DNA, 15 bp, Homo sapiens
cttaacccacccctt

SEQ ID NO: 39908 - DNA, 15 bp, Homo sapiens
ttaacccaccccttc

SEQ ID NO: 39909 - DNA, 15 bp, Homo sapiens
taacccaccccttcc

SEQ ID NO: 39910 - DNA, 15 bp, Homo sapiens
aacccaccccttccc

SEQ ID NO: 39911 - DNA, 15 bp, Homo sapiens
acccaccccttccct

SEQ ID NO: 39912 - DNA, 15 bp, Homo sapiens
cccaccccttccctg

SEQ ID NO: 39913 - DNA, 15 bp, Homo sapiens
ccaccccttccctga

SEQ ID NO: 39914 - DNA, 15 bp, Homo sapiens
caccccttccctgac

SEQ ID NO: 39915 - DNA, 15 bp, Homo sapiens
accccttccctgacc

SEQ ID NO: 39916 - DNA, 15 bp, Homo sapiens
ccccttccctgaccc

SEQ ID NO: 39917 - DNA, 15 bp, Homo sapiens
cccttccctgaccct

SEQ ID NO: 39918 - DNA, 15 bp, Homo sapiens
ccttccctgaccctt

SEQ ID NO: 39919 - DNA, 15 bp, Homo sapiens
cttccctgaccctta

SEQ ID NO: 39920 - DNA, 15 bp, Homo sapiens
ttccctgacccttaa

SEQ ID NO: 39921 - DNA, 15 bp, Homo sapiens
tccctgacccttaag

SEQ ID NO: 39922 - DNA, 15 bp, Homo sapiens
ccctgacccttaagt

SEQ ID NO: 39923 - DNA, 15 bp, Homo sapiens
cctgacccttaagtt

SEQ ID NO: 39924 - DNA, 15 bp, Homo sapiens
ctgacccttaagttg

SEQ ID NO: 39925 - DNA, 15 bp, Homo sapiens
tgacccttaagttgg

SEQ ID NO: 39926 - DNA, 15 bp, Homo sapiens
gacccttaagttggc

SEQ ID NO: 39927 - DNA, 15 bp, Homo sapiens
acccttaagttggcc

SEQ ID NO: 39928 - DNA, 15 bp, Homo sapiens
cccttaagttggcct

SEQ ID NO: 39929 - DNA, 15 bp, Homo sapiens
ccttaagttggcctg

SEQ ID NO: 39930 - DNA, 15 bp, Homo sapiens
cttaagttggcctgg

SEQ ID NO: 39931 - DNA, 15 bp, Homo sapiens
ttaagttggcctggc

SEQ ID NO: 39932 - DNA, 15 bp, Homo sapiens
taagttggcctggcc

SEQ ID NO: 39933 - DNA, 15 bp, Homo sapiens
aagttggcctggccc

SEQ ID NO: 39934 - DNA, 15 bp, Homo sapiens
agttggcctggccct

SEQ ID NO: 39935 - DNA, 15 bp, Homo sapiens
gttggcctggccctt

SEQ ID NO: 39936 - DNA, 15 bp, Homo sapiens
ttggcctggcccttt

SEQ ID NO: 39937 - DNA, 15 bp, Homo sapiens
tggcctggcccttta

SEQ ID NO: 39938 - DNA, 15 bp, Homo sapiens
ggcctggccctttac

SEQ ID NO: 39939 - DNA, 15 bp, Homo sapiens
gcctggccctttacc

SEQ ID NO: 39940 - DNA, 15 bp, Homo sapiens
cctggccctttaccc

SEQ ID NO: 39941 - DNA, 15 bp, Homo sapiens
ctggccctttacccc

SEQ ID NO: 39942 - DNA, 15 bp, Homo sapiens
tggccctttacccct

SEQ ID NO: 39943 - DNA, 15 bp, Homo sapiens
ggccctttacccctt

SEQ ID NO: 39944 - DNA, 15 bp, Homo sapiens
gccctttaccccttc

SEQ ID NO: 39945 - DNA, 15 bp, Homo sapiens
ccctttaccccttcc

SEQ ID NO: 39946 - DNA, 15 bp, Homo sapiens
cctttaccccttcca

SEQ ID NO: 39947 - DNA, 15 bp, Homo sapiens
ctttaccccttccaa

SEQ ID NO: 39948 - DNA, 15 bp, Homo sapiens
tttaccccttccaaa

SEQ ID NO: 39949 - DNA, 15 bp, Homo sapiens
ttaccccttccaaat

SEQ ID NO: 39950 - DNA, 15 bp, Homo sapiens
taccccttccaaatc

SEQ ID NO: 39951 - DNA, 15 bp, Homo sapiens
accccttccaaatcc

SEQ ID NO: 39952 - DNA, 15 bp, Homo sapiens
ccccttccaaatcct

SEQ ID NO: 39953 - DNA, 15 bp, Homo sapiens
cccttccaaatcctt

SEQ ID NO: 39954 - DNA, 15 bp, Homo sapiens
ccttccaaatccttg

SEQ ID NO: 39955 - DNA, 15 bp, Homo sapiens
cttccaaatccttga

SEQ ID NO: 39956 - DNA, 15 bp, Homo sapiens
ttccaaatccttgac

SEQ ID NO: 39957 - DNA, 15 bp, Homo sapiens
tccaaatccttgacc

SEQ ID NO: 39958 - DNA, 15 bp, Homo sapiens
ccaaatccttgaccc

SEQ ID NO: 39959 - DNA, 15 bp, Homo sapiens
caaatccttgacccc

SEQ ID NO: 39960 - DNA, 15 bp, Homo sapiens
aaatccttgacccca

SEQ ID NO: 39961 - DNA, 15 bp, Homo sapiens
aatccttgaccccac

SEQ ID NO: 39962 - DNA, 15 bp, Homo sapiens
atccttgaccccact

SEQ ID NO: 39963 - DNA, 15 bp, Homo sapiens
tccttgaccccactt

SEQ ID NO: 39964 - DNA, 15 bp, Homo sapiens
ccttgaccccacttc

SEQ ID NO: 39965 - DNA, 15 bp, Homo sapiens
cttgaccccacttct

SEQ ID NO: 39966 - DNA, 15 bp, Homo sapiens
ttgaccccacttctg

SEQ ID NO: 39967 - DNA, 15 bp, Homo sapiens
tgaccccacttctga

SEQ ID NO: 39968 - DNA, 15 bp, Homo sapiens
gaccccacttctgac

SEQ ID NO: 39969 - DNA, 15 bp, Homo sapiens
accccacttctgacc

SEQ ID NO: 39970 - DNA, 15 bp, Homo sapiens
ccccacttctgaccc

SEQ ID NO: 39971 - DNA, 15 bp, Homo sapiens
cccacttctgaccct

SEQ ID NO: 39972 - DNA, 15 bp, Homo sapiens
ccacttctgaccctt

SEQ ID NO: 39973 - DNA, 15 bp, Homo sapiens
cacttctgacccttc

SEQ ID NO: 39974 - DNA, 15 bp, Homo sapiens
acttctgacccttca

SEQ ID NO: 39975 - DNA, 15 bp, Homo sapiens
cttctgacccttcac

SEQ ID NO: 39976 - DNA, 15 bp, Homo sapiens
ttctgacccttcacc

SEQ ID NO: 39977 - DNA, 15 bp, Homo sapiens
tctgacccttcacct

SEQ ID NO: 39978 - DNA, 15 bp, Homo sapiens
ctgacccttcacctt

SEQ ID NO: 39979 - DNA, 15 bp, Homo sapiens
tgacccttcaccttc

SEQ ID NO: 39980 - DNA, 15 bp, Homo sapiens
gacccttcaccttcc

SEQ ID NO: 39981 - DNA, 15 bp, Homo sapiens
acccttcaccttccc

SEQ ID NO: 39982 - DNA, 15 bp, Homo sapiens
cccttcaccttcccc

SEQ ID NO: 39983 - DNA, 15 bp, Homo sapiens
ccttcaccttcccca

SEQ ID NO: 39984 - DNA, 15 bp, Homo sapiens
cttcaccttccccaa

SEQ ID NO: 39985 - DNA, 15 bp, Homo sapiens
ttcaccttccccaac

SEQ ID NO: 39986 - DNA, 15 bp, Homo sapiens
tcaccttccccaacc

SEQ ID NO: 39987 - DNA, 15 bp, Homo sapiens
caccttccccaaccc

SEQ ID NO: 39988 - DNA, 15 bp, Homo sapiens
accttccccaaccct

SEQ ID NO: 39989 - DNA, 15 bp, Homo sapiens
ccttccccaaccctg

SEQ ID NO: 39990 - DNA, 15 bp, Homo sapiens
cttccccaaccctga

SEQ ID NO: 39991 - DNA, 15 bp, Homo sapiens
ttccccaaccctgaa

SEQ ID NO: 39992 - DNA, 15 bp, Homo sapiens
tccccaaccctgaaa

SEQ ID NO: 39993 - DNA, 15 bp, Homo sapiens
ccccaaccctgaaat

SEQ ID NO: 39994 - DNA, 15 bp, Homo sapiens
cccaaccctgaaatg

SEQ ID NO: 39995 - DNA, 15 bp, Homo sapiens
ccaaccctgaaatgt

SEQ ID NO: 39996 - DNA, 15 bp, Homo sapiens
caaccctgaaatgtc

SEQ ID NO: 39997 - DNA, 15 bp, Homo sapiens
aaccctgaaatgtca

SEQ ID NO: 39998 - DNA, 15 bp, Homo sapiens
accctgaaatgtcac

SEQ ID NO: 39999 - DNA, 15 bp, Homo sapiens
ccctgaaatgtcacc

SEQ ID NO: 40000 - DNA, 15 bp, Homo sapiens
cctgaaatgtcacct

SEQ ID NO: 40001 - DNA, 15 bp, Homo sapiens
ctgaaatgtcacctc

SEQ ID NO: 40002 - DNA, 15 bp, Homo sapiens
tgaaatgtcacctcc

SEQ ID NO: 40003 - DNA, 15 bp, Homo sapiens
gaaatgtcacctcca

SEQ ID NO: 40004 - DNA, 15 bp, Homo sapiens
aaatgtcacctccac

SEQ ID NO: 40005 - DNA, 15 bp, Homo sapiens
aatgtcacctccaca

SEQ ID NO: 40006 - DNA, 15 bp, Homo sapiens
atgtcacctccacag

SEQ ID NO: 40007 - DNA, 15 bp, Homo sapiens
tgtcacctccacaga

SEQ ID NO: 40008 - DNA, 15 bp, Homo sapiens
gtcacctccacagag

SEQ ID NO: 40009 - DNA, 15 bp, Homo sapiens
tcacctccacagaga

SEQ ID NO: 40010 - DNA, 15 bp, Homo sapiens
cacctccacagagaa

SEQ ID NO: 40011 - DNA, 15 bp, Homo sapiens
acctccacagagaac

SEQ ID NO: 40012 - DNA, 15 bp, Homo sapiens
cctccacagagaacc

SEQ ID NO: 40013 - DNA, 15 bp, Homo sapiens
ctccacagagaaccc

SEQ ID NO: 40014 - DNA, 15 bp, Homo sapiens
tccacagagaacccc

SEQ ID NO: 40015 - DNA, 15 bp, Homo sapiens
ccacagagaacccca

SEQ ID NO: 40016 - DNA, 15 bp, Homo sapiens
cacagagaaccccaa

SEQ ID NO: 40017 - DNA, 15 bp, Homo sapiens
acagagaaccccaac

SEQ ID NO: 40018 - DNA, 15 bp, Homo sapiens
cagagaaccccaact

SEQ ID NO: 40019 - DNA, 15 bp, Homo sapiens
agagaaccccaactc

SEQ ID NO: 40020 - DNA, 15 bp, Homo sapiens
gagaaccccaactcc

SEQ ID NO: 40021 - DNA, 15 bp, Homo sapiens
agaaccccaactcca

SEQ ID NO: 40022 - DNA, 15 bp, Homo sapiens
gaaccccaactccaa

SEQ ID NO: 40023 - DNA, 15 bp, Homo sapiens
aaccccaactccaac

SEQ ID NO: 40024 - DNA, 15 bp, Homo sapiens
accccaactccaact

SEQ ID NO: 40025 - DNA, 15 bp, Homo sapiens
ccccaactccaactc

SEQ ID NO: 40026 - DNA, 15 bp, Homo sapiens
cccaactccaactcc

SEQ ID NO: 40027 - DNA, 15 bp, Homo sapiens
ccaactccaactcca

SEQ ID NO: 40028 - DNA, 15 bp, Homo sapiens
caactccaactccat

SEQ ID NO: 40029 - DNA, 15 bp, Homo sapiens
aactccaactccatc

SEQ ID NO: 40030 - DNA, 15 bp, Homo sapiens
actccaactccatcc

SEQ ID NO: 40031 - DNA, 15 bp, Homo sapiens
ctccaactccatccc

SEQ ID NO: 40032 - DNA, 15 bp, Homo sapiens
tccaactccatccca

SEQ ID NO: 40033 - DNA, 15 bp, Homo sapiens
ccaactccatcccag

SEQ ID NO: 40034 - DNA, 15 bp, Homo sapiens
caactccatcccaga

SEQ ID NO: 40035 - DNA, 15 bp, Homo sapiens
aactccatcccagac

SEQ ID NO: 40036 - DNA, 15 bp, Homo sapiens
actccatcccagacc

SEQ ID NO: 40037 - DNA, 15 bp, Homo sapiens
ctccatcccagacct

SEQ ID NO: 40038 - DNA, 15 bp, Homo sapiens
tccatcccagacctt

SEQ ID NO: 40039 - DNA, 15 bp, Homo sapiens
ccatcccagaccttt

SEQ ID NO: 40040 - DNA, 15 bp, Homo sapiens
catcccagacctttc

SEQ ID NO: 40041 - DNA, 15 bp, Homo sapiens
atcccagacctttca

SEQ ID NO: 40042 - DNA, 15 bp, Homo sapiens
tcccagacctttcac

SEQ ID NO: 40043 - DNA, 15 bp, Homo sapiens
cccagacctttcacc

SEQ ID NO: 40044 - DNA, 15 bp, Homo sapiens
ccagacctttcacct

SEQ ID NO: 40045 - DNA, 15 bp, Homo sapiens
cagacctttcacctc

SEQ ID NO: 40046 - DNA, 15 bp, Homo sapiens
agacctttcacctca

SEQ ID NO: 40047 - DNA, 15 bp, Homo sapiens
gacctttcacctcac

SEQ ID NO: 40048 - DNA, 15 bp, Homo sapiens
acctttcacctcact

SEQ ID NO: 40049 - DNA, 15 bp, Homo sapiens
cctttcacctcactt

SEQ ID NO: 40050 - DNA, 15 bp, Homo sapiens
ctttcacctcacttc

SEQ ID NO: 40051 - DNA, 15 bp, Homo sapiens
tttcacctcacttca

SEQ ID NO: 40052 - DNA, 15 bp, Homo sapiens
ttcacctcacttcag

SEQ ID NO: 40053 - DNA, 15 bp, Homo sapiens
tcacctcacttcagc

SEQ ID NO: 40054 - DNA, 15 bp, Homo sapiens
cacctcacttcagcc

SEQ ID NO: 40055 - DNA, 15 bp, Homo sapiens
acctcacttcagccc

SEQ ID NO: 40056 - DNA, 15 bp, Homo sapiens
cctcacttcagccct

SEQ ID NO: 40057 - DNA, 15 bp, Homo sapiens
ctcacttcagcccta

SEQ ID NO: 40058 - DNA, 15 bp, Homo sapiens
tcacttcagccctag

SEQ ID NO: 40059 - DNA, 15 bp, Homo sapiens
cacttcagccctagc

SEQ ID NO: 40060 - DNA, 15 bp, Homo sapiens
acttcagccctagcc

SEQ ID NO: 40061 - DNA, 15 bp, Homo sapiens
cttcagccctagccc

SEQ ID NO: 40062 - DNA, 15 bp, Homo sapiens
ttcagccctagccct

SEQ ID NO: 40063 - DNA, 15 bp, Homo sapiens
tcagccctagccctg

SEQ ID NO: 40064 - DNA, 15 bp, Homo sapiens
cagccctagccctga

SEQ ID NO: 40065 - DNA, 15 bp, Homo sapiens
agccctagccctgaa

SEQ ID NO: 40066 - DNA, 15 bp, Homo sapiens
gccctagccctgaac

SEQ ID NO: 40067 - DNA, 15 bp, Homo sapiens
ccctagccctgaaca

SEQ ID NO: 40068 - DNA, 15 bp, Homo sapiens
cctagccctgaacaa

SEQ ID NO: 40069 - DNA, 15 bp, Homo sapiens
ctagccctgaacaag

SEQ ID NO: 40070 - DNA, 15 bp, Homo sapiens
tagccctgaacaaga

SEQ ID NO: 40071 - DNA, 15 bp, Homo sapiens
gccctgaacaagacc

SEQ ID NO: 40072 - DNA, 15 bp, Homo sapiens
ccctgaacaagaccc

SEQ ID NO: 40073 - DNA, 15 bp, Homo sapiens
cctgaacaagacccc

SEQ ID NO: 40074 - DNA, 15 bp, Homo sapiens
ctgaacaagacccca

SEQ ID NO: 40075 - DNA, 15 bp, Homo sapiens
tgaacaagaccccac

SEQ ID NO: 40076 - DNA, 15 bp, Homo sapiens
gaacaagaccccact

SEQ ID NO: 40077 - DNA, 15 bp, Homo sapiens
aacaagaccccactc

SEQ ID NO: 40078 - DNA, 15 bp, Homo sapiens
acaagaccccactcc

SEQ ID NO: 40079 - DNA, 15 bp, Homo sapiens
caagaccccactccc

SEQ ID NO: 40080 - DNA, 15 bp, Homo sapiens
aagaccccactccca

SEQ ID NO: 40081 - DNA, 15 bp, Homo sapiens
agaccccactcccaa

SEQ ID NO: 40082 - DNA, 15 bp, Homo sapiens
gaccccactcccaac

SEQ ID NO: 40083 - DNA, 15 bp, Homo sapiens
accccactcccaacc

SEQ ID NO: 40084 - DNA, 15 bp, Homo sapiens
ccccactcccaacct

SEQ ID NO: 40085 - DNA, 15 bp, Homo sapiens
cccactcccaacctc

SEQ ID NO: 40086 - DNA, 15 bp, Homo sapiens
ccactcccaacctca

SEQ ID NO: 40087 - DNA, 15 bp, Homo sapiens
cactcccaacctcag

SEQ ID NO: 40088 - DNA, 15 bp, Homo sapiens
actcccaacctcagt

SEQ ID NO: 40089 - DNA, 15 bp, Homo sapiens
ctcccaacctcagtc

SEQ ID NO: 40090 - DNA, 15 bp, Homo sapiens
tcccaacctcagtcc

SEQ ID NO: 40091 - DNA, 15 bp, Homo sapiens
cccaacctcagtcct

SEQ ID NO: 40092 - DNA, 15 bp, Homo sapiens
ccaacctcagtcctg

SEQ ID NO: 40093 - DNA, 15 bp, Homo sapiens
caacctcagtcctga

SEQ ID NO: 40094 - DNA, 15 bp, Homo sapiens
aacctcagtcctgat

SEQ ID NO: 40095 - DNA, 15 bp, Homo sapiens
acctcagtcctgatc

SEQ ID NO: 40096 - DNA, 15 bp, Homo sapiens
cctcagtcctgatcc

SEQ ID NO: 40097 - DNA, 15 bp, Homo sapiens
ctcagtcctgatccc

SEQ ID NO: 40098 - DNA, 15 bp, Homo sapiens
tcagtcctgatccct

SEQ ID NO: 40099 - DNA, 15 bp, Homo sapiens
cagtcctgatccctt

SEQ ID NO: 40100 - DNA, 15 bp, Homo sapiens
agtcctgatccctta

SEQ ID NO: 40101 - DNA, 15 bp, Homo sapiens
gtcctgatcccttac

SEQ ID NO: 40102 - DNA, 15 bp, Homo sapiens
tcctgatcccttacc

SEQ ID NO: 40103 - DNA, 15 bp, Homo sapiens
cctgatcccttacct

SEQ ID NO: 40104 - DNA, 15 bp, Homo sapiens
ctgatcccttaccta

SEQ ID NO: 40105 - DNA, 15 bp, Homo sapiens
tgatcccttacctaa

SEQ ID NO: 40106 - DNA, 15 bp, Homo sapiens
gatcccttacctaat

SEQ ID NO: 40107 - DNA, 15 bp, Homo sapiens
atcccttacctaatc

SEQ ID NO: 40108 - DNA, 15 bp, Homo sapiens
tcccttacctaatcc

SEQ ID NO: 40109 - DNA, 15 bp, Homo sapiens
cccttacctaatccc

SEQ ID NO: 40110 - DNA, 15 bp, Homo sapiens
ccttacctaatccca

SEQ ID NO: 40111 - DNA, 15 bp, Homo sapiens
cttacctaatcccag

SEQ ID NO: 40112 - DNA, 15 bp, Homo sapiens
ttacctaatcccaga

SEQ ID NO: 40113 - DNA, 15 bp, Homo sapiens
tacctaatcccagaa

SEQ ID NO: 40114 - DNA, 15 bp, Homo sapiens
acctaatcccagaac

SEQ ID NO: 40115 - DNA, 15 bp, Homo sapiens
cctaatcccagaaca

SEQ ID NO: 40116 - DNA, 15 bp, Homo sapiens
ctaatcccagaacaa

SEQ ID NO: 40117 - DNA, 15 bp, Homo sapiens
taatcccagaacaac

SEQ ID NO: 40118 - DNA, 15 bp, Homo sapiens
aatcccagaacaacc

SEQ ID NO: 40119 - DNA, 15 bp, Homo sapiens
atcccagaacaacca

SEQ ID NO: 40120 - DNA, 15 bp, Homo sapiens
tcccagaacaaccat

SEQ ID NO: 40121 - DNA, 15 bp, Homo sapiens
cccagaacaaccata

SEQ ID NO: 40122 - DNA, 15 bp, Homo sapiens
ccagaacaaccatac

SEQ ID NO: 40123 - DNA, 15 bp, Homo sapiens
cagaacaaccatacc

SEQ ID NO: 40124 - DNA, 15 bp, Homo sapiens
agaacaaccataccc

SEQ ID NO: 40125 - DNA, 15 bp, Homo sapiens
gaacaaccataccca

SEQ ID NO: 40126 - DNA, 15 bp, Homo sapiens
aacaaccatacccac

SEQ ID NO: 40127 - DNA, 15 bp, Homo sapiens
acaaccatacccaca

SEQ ID NO: 40128 - DNA, 15 bp, Homo sapiens
caaccatacccacac

SEQ ID NO: 40129 - DNA, 15 bp, Homo sapiens
aaccatacccacacc

SEQ ID NO: 40130 - DNA, 15 bp, Homo sapiens
accatacccacaccc

SEQ ID NO: 40131 - DNA, 15 bp, Homo sapiens
ccatacccacaccca

SEQ ID NO: 40132 - DNA, 15 bp, Homo sapiens
catacccacacccat

SEQ ID NO: 40133 - DNA, 15 bp, Homo sapiens
atacccacacccatc

SEQ ID NO: 40134 - DNA, 15 bp, Homo sapiens
tacccacacccatct

SEQ ID NO: 40135 - DNA, 15 bp, Homo sapiens
acccacacccatcta

SEQ ID NO: 40136 - DNA, 15 bp, Homo sapiens
cccacacccatctaa

SEQ ID NO: 40137 - DNA, 15 bp, Homo sapiens
ccacacccatctaac

SEQ ID NO: 40138 - DNA, 15 bp, Homo sapiens
cacacccatctaacc

SEQ ID NO: 40139 - DNA, 15 bp, Homo sapiens
acacccatctaaccc

SEQ ID NO: 40140 - DNA, 15 bp, Homo sapiens
cacccatctaaccct

SEQ ID NO: 40141 - DNA, 15 bp, Homo sapiens
acccatctaaccctg

SEQ ID NO: 40142 - DNA, 15 bp, Homo sapiens
cccatctaaccctgc

SEQ ID NO: 40143 - DNA, 15 bp, Homo sapiens
ccatctaaccctgcc

SEQ ID NO: 40144 - DNA, 15 bp, Homo sapiens
catctaaccctgccc

SEQ ID NO: 40145 - DNA, 15 bp, Homo sapiens
atctaaccctgccca

SEQ ID NO: 40146 - DNA, 15 bp, Homo sapiens
tctaaccctgcccaa

SEQ ID NO: 40147 - DNA, 15 bp, Homo sapiens
ctaaccctgcccaac

SEQ ID NO: 40148 - DNA, 15 bp, Homo sapiens
taaccctgcccaacc

SEQ ID NO: 40149 - DNA, 15 bp, Homo sapiens
aaccctgcccaaccc

SEQ ID NO: 40150 - DNA, 15 bp, Homo sapiens
accctgcccaacccg

SEQ ID NO: 40151 - DNA, 15 bp, Homo sapiens
ccctgcccaacccga

SEQ ID NO: 40152 - DNA, 15 bp, Homo sapiens
cctgcccaacccgac

SEQ ID NO: 40153 - DNA, 15 bp, Homo sapiens
ctgcccaacccgaca

SEQ ID NO: 40154 - DNA, 15 bp, Homo sapiens
tgcccaacccgacac

SEQ ID NO: 40155 - DNA, 15 bp, Homo sapiens
gcccaacccgacact

SEQ ID NO: 40156 - DNA, 15 bp, Homo sapiens
cccaacccgacactt

SEQ ID NO: 40157 - DNA, 15 bp, Homo sapiens
ccaacccgacacttc

SEQ ID NO: 40158 - DNA, 15 bp, Homo sapiens
caacccgacacttca

SEQ ID NO: 40159 - DNA, 15 bp, Homo sapiens
aacccgacacttcac

SEQ ID NO: 40160 - DNA, 15 bp, Homo sapiens
acccgacacttcacc

SEQ ID NO: 40161 - DNA, 15 bp, Homo sapiens
cccgacacttcaccc

SEQ ID NO: 40162 - DNA, 15 bp, Homo sapiens
ccgacacttcacccc

SEQ ID NO: 40163 - DNA, 15 bp, Homo sapiens
cgacacttcacccct

SEQ ID NO: 40164 - DNA, 15 bp, Homo sapiens
gacacttcacccctt

SEQ ID NO: 40165 - DNA, 15 bp, Homo sapiens
acacttcaccccttt

SEQ ID NO: 40166 - DNA, 15 bp, Homo sapiens
cacttcacccctttt

SEQ ID NO: 40167 - DNA, 15 bp, Homo sapiens
acttcaccccttttc

SEQ ID NO: 40168 - DNA, 15 bp, Homo sapiens
cttcaccccttttct

SEQ ID NO: 40169 - DNA, 15 bp, Homo sapiens
ttcaccccttttcta

SEQ ID NO: 40170 - DNA, 15 bp, Homo sapiens
tcaccccttttctaa

SEQ ID NO: 40171 - DNA, 15 bp, Homo sapiens
caccccttttctaac

SEQ ID NO: 40172 - DNA, 15 bp, Homo sapiens
accccttttctaacc

SEQ ID NO: 40173 - DNA, 15 bp, Homo sapiens
ccccttttctaaccc

SEQ ID NO: 40174 - DNA, 15 bp, Homo sapiens
cccttttctaacccc

SEQ ID NO: 40175 - DNA, 15 bp, Homo sapiens
ccttttctaacccca

SEQ ID NO: 40176 - DNA, 15 bp, Homo sapiens
cttttctaaccccat

SEQ ID NO: 40177 - DNA, 15 bp, Homo sapiens
ttttctaaccccatc

SEQ ID NO: 40178 - DNA, 15 bp, Homo sapiens
tttctaaccccatct

SEQ ID NO: 40179 - DNA, 15 bp, Homo sapiens
ttctaaccccatctt

SEQ ID NO: 40180 - DNA, 15 bp, Homo sapiens
tctaaccccatcttt

SEQ ID NO: 40181 - DNA, 15 bp, Homo sapiens
ctaaccccatctttg

SEQ ID NO: 40182 - DNA, 15 bp, Homo sapiens
taaccccatctttga

SEQ ID NO: 40183 - DNA, 15 bp, Homo sapiens
aaccccatctttgac

SEQ ID NO: 40184 - DNA, 15 bp, Homo sapiens
accccatctttgacc

SEQ ID NO: 40185 - DNA, 15 bp, Homo sapiens
ccccatctttgaccc

SEQ ID NO: 40186 - DNA, 15 bp, Homo sapiens
cccatctttgacccc

SEQ ID NO: 40187 - DNA, 15 bp, Homo sapiens
ccatctttgacccca

SEQ ID NO: 40188 - DNA, 15 bp, Homo sapiens
catctttgaccccat

SEQ ID NO: 40189 - DNA, 15 bp, Homo sapiens
atctttgaccccatg

SEQ ID NO: 40190 - DNA, 15 bp, Homo sapiens
tctttgaccccatgc

SEQ ID NO: 40191 - DNA, 15 bp, Homo sapiens
ctttgaccccatgct

SEQ ID NO: 40192 - DNA, 15 bp, Homo sapiens
tttgaccccatgctt

SEQ ID NO: 40193 - DNA, 15 bp, Homo sapiens
ttgaccccatgcttc

SEQ ID NO: 40194 - DNA, 15 bp, Homo sapiens
tgaccccatgcttca

SEQ ID NO: 40195 - DNA, 15 bp, Homo sapiens
gaccccatgcttcac

SEQ ID NO: 40196 - DNA, 15 bp, Homo sapiens
accccatgcttcacc

SEQ ID NO: 40197 - DNA, 15 bp, Homo sapiens
ccccatgcttcaccc

SEQ ID NO: 40198 - DNA, 15 bp, Homo sapiens
cccatgcttcacccc

SEQ ID NO: 40199 - DNA, 15 bp, Homo sapiens
ccatgcttcacccca

SEQ ID NO: 40200 - DNA, 15 bp, Homo sapiens
catgcttcaccccac

SEQ ID NO: 40201 - DNA, 15 bp, Homo sapiens
atgcttcaccccaca

SEQ ID NO: 40202 - DNA, 15 bp, Homo sapiens
tgcttcaccccacat

SEQ ID NO: 40203 - DNA, 15 bp, Homo sapiens
gcttcaccccacatc

SEQ ID NO: 40204 - DNA, 15 bp, Homo sapiens
cttcaccccacatct

SEQ ID NO: 40205 - DNA, 15 bp, Homo sapiens
ttcaccccacatcta

SEQ ID NO: 40206 - DNA, 15 bp, Homo sapiens
tcaccccacatctag

SEQ ID NO: 40207 - DNA, 15 bp, Homo sapiens
caccccacatctagt

SEQ ID NO: 40208 - DNA, 15 bp, Homo sapiens
accccacatctagtc

SEQ ID NO: 40209 - DNA, 15 bp, Homo sapiens
ccccacatctagtcc

SEQ ID NO: 40210 - DNA, 15 bp, Homo sapiens
cccacatctagtcct

SEQ ID NO: 40211 - DNA, 15 bp, Homo sapiens
ccacatctagtcctg

SEQ ID NO: 40212 - DNA, 15 bp, Homo sapiens
cacatctagtcctgt

SEQ ID NO: 40213 - DNA, 15 bp, Homo sapiens
acatctagtcctgtc

SEQ ID NO: 40214 - DNA, 15 bp, Homo sapiens
catctagtcctgtcc

SEQ ID NO: 40215 - DNA, 15 bp, Homo sapiens
atctagtcctgtccc

SEQ ID NO: 40216 - DNA, 15 bp, Homo sapiens
tctagtcctgtccct

SEQ ID NO: 40217 - DNA, 15 bp, Homo sapiens
ctagtcctgtccctg

SEQ ID NO: 40218 - DNA, 15 bp, Homo sapiens
tagtcctgtccctga

SEQ ID NO: 40219 - DNA, 15 bp, Homo sapiens
agtcctgtccctgat

SEQ ID NO: 40220 - DNA, 15 bp, Homo sapiens
gtcctgtccctgatt

SEQ ID NO: 40221 - DNA, 15 bp, Homo sapiens
tcctgtccctgatta

SEQ ID NO: 40222 - DNA, 15 bp, Homo sapiens
cctgtccctgattac

SEQ ID NO: 40223 - DNA, 15 bp, Homo sapiens
ctgtccctgattacc

SEQ ID NO: 40224 - DNA, 15 bp, Homo sapiens
tgtccctgattacct

SEQ ID NO: 40225 - DNA, 15 bp, Homo sapiens
gtccctgattacctg

SEQ ID NO: 40226 - DNA, 15 bp, Homo sapiens
tccctgattacctgc

SEQ ID NO: 40227 - DNA, 15 bp, Homo sapiens
ccctgattacctgcc

SEQ ID NO: 40228 - DNA, 15 bp, Homo sapiens
cctgattacctgccc

SEQ ID NO: 40229 - DNA, 15 bp, Homo sapiens
ctgattacctgcccc

SEQ ID NO: 40230 - DNA, 15 bp, Homo sapiens
tgattacctgcccct

SEQ ID NO: 40231 - DNA, 15 bp, Homo sapiens
gattacctgccccta

SEQ ID NO: 40232 - DNA, 15 bp, Homo sapiens
attacctgcccctac

SEQ ID NO: 40233 - DNA, 15 bp, Homo sapiens
ttacctgcccctaca

SEQ ID NO: 40234 - DNA, 15 bp, Homo sapiens
tacctgcccctacaa

SEQ ID NO: 40235 - DNA, 15 bp, Homo sapiens
acctgcccctacaat

SEQ ID NO: 40236 - DNA, 15 bp, Homo sapiens
cctgcccctacaatt

SEQ ID NO: 40237 - DNA, 15 bp, Homo sapiens
ctgcccctacaattc

SEQ ID NO: 40238 - DNA, 15 bp, Homo sapiens
tgcccctacaattcc

SEQ ID NO: 40239 - DNA, 15 bp, Homo sapiens
gcccctacaattccg

SEQ ID NO: 40240 - DNA, 15 bp, Homo sapiens
cccctacaattccgc

SEQ ID NO: 40241 - DNA, 15 bp, Homo sapiens
ccctacaattccgcc

SEQ ID NO: 40242 - DNA, 15 bp, Homo sapiens
cctacaattccgccc

SEQ ID NO: 40243 - DNA, 15 bp, Homo sapiens
ctacaattccgcccc

SEQ ID NO: 40244 - DNA, 15 bp, Homo sapiens
tacaattccgccccc

SEQ ID NO: 40245 - DNA, 15 bp, Homo sapiens
acaattccgccccca

SEQ ID NO: 40246 - DNA, 15 bp, Homo sapiens
caattccgcccccat

SEQ ID NO: 40247 - DNA, 15 bp, Homo sapiens
aattccgcccccatg

SEQ ID NO: 40248 - DNA, 15 bp, Homo sapiens
attccgcccccatgt

SEQ ID NO: 40249 - DNA, 15 bp, Homo sapiens
ttccgcccccatgtc

SEQ ID NO: 40250 - DNA, 15 bp, Homo sapiens
tccgcccccatgtca

SEQ ID NO: 40251 - DNA, 15 bp, Homo sapiens
ccgcccccatgtcag

SEQ ID NO: 40252 - DNA, 15 bp, Homo sapiens
cgcccccatgtcaga

SEQ ID NO: 40253 - DNA, 15 bp, Homo sapiens
gcccccatgtcagat

SEQ ID NO: 40254 - DNA, 15 bp, Homo sapiens
cccccatgtcagatg

SEQ ID NO: 40255 - DNA, 15 bp, Homo sapiens
ccccatgtcagatgg

SEQ ID NO: 40256 - DNA, 15 bp, Homo sapiens
cccatgtcagatggc

SEQ ID NO: 40257 - DNA, 15 bp, Homo sapiens
ccatgtcagatggct

SEQ ID NO: 40258 - DNA, 15 bp, Homo sapiens
catgtcagatggctc

SEQ ID NO: 40259 - DNA, 15 bp, Homo sapiens
atgtcagatggctcg

SEQ ID NO: 40260 - DNA, 15 bp, Homo sapiens
tgtcagatggctcgg

SEQ ID NO: 40261 - DNA, 15 bp, Homo sapiens
gtcagatggctcggg

SEQ ID NO: 40262 - DNA, 15 bp, Homo sapiens
tcagatggctcgggg

SEQ ID NO: 40263 - DNA, 15 bp, Homo sapiens
cagatggctcggggt

SEQ ID NO: 40264 - DNA, 15 bp, Homo sapiens
agatggctcggggta

SEQ ID NO: 40265 - DNA, 15 bp, Homo sapiens
gatggctcggggtag

SEQ ID NO: 40266 - DNA, 15 bp, Homo sapiens
atggctcggggtagg

SEQ ID NO: 40267 - DNA, 15 bp, Homo sapiens
tggctcggggtaggt

SEQ ID NO: 40268 - DNA, 15 bp, Homo sapiens
ggctcggggtaggtc

SEQ ID NO: 40269 - DNA, 15 bp, Homo sapiens
gctcggggtaggtca

SEQ ID NO: 40270 - DNA, 15 bp, Homo sapiens
ctcggggtaggtcat

SEQ ID NO: 40271 - DNA, 15 bp, Homo sapiens
tcggggtaggtcata

SEQ ID NO: 40272 - DNA, 15 bp, Homo sapiens
cggggtaggtcatag

SEQ ID NO: 40273 - DNA, 15 bp, Homo sapiens
ggggtaggtcatagc

SEQ ID NO: 40274 - DNA, 15 bp, Homo sapiens
gggtaggtcatagcc

SEQ ID NO: 40275 - DNA, 15 bp, Homo sapiens
ggtaggtcatagccc

SEQ ID NO: 40276 - DNA, 15 bp, Homo sapiens
gtaggtcatagcccc

SEQ ID NO: 40277 - DNA, 15 bp, Homo sapiens
taggtcatagcccct

SEQ ID NO: 40278 - DNA, 15 bp, Homo sapiens
aggtcatagcccctc

SEQ ID NO: 40279 - DNA, 15 bp, Homo sapiens
ggtcatagcccctct

SEQ ID NO: 40280 - DNA, 15 bp, Homo sapiens
gtcatagcccctcta

SEQ ID NO: 40281 - DNA, 15 bp, Homo sapiens
tcatagcccctctaa

SEQ ID NO: 40282 - DNA, 15 bp, Homo sapiens
catagcccctctaaa

SEQ ID NO: 40283 - DNA, 15 bp, Homo sapiens
atagcccctctaaac

SEQ ID NO: 40284 - DNA, 15 bp, Homo sapiens
tagcccctctaaacc

SEQ ID NO: 40285 - DNA, 15 bp, Homo sapiens
agcccctctaaaccc

SEQ ID NO: 40286 - DNA, 15 bp, Homo sapiens
gcccctctaaacccc

SEQ ID NO: 40287 - DNA, 15 bp, Homo sapiens
cccctctaaacccca

SEQ ID NO: 40288 - DNA, 15 bp, Homo sapiens
ccctctaaaccccaa

SEQ ID NO: 40289 - DNA, 15 bp, Homo sapiens
cctctaaaccccaag

SEQ ID NO: 40290 - DNA, 15 bp, Homo sapiens
ctctaaaccccaagt

SEQ ID NO: 40291 - DNA, 15 bp, Homo sapiens
tctaaaccccaagtt

SEQ ID NO: 40292 - DNA, 15 bp, Homo sapiens
ctaaaccccaagttt

SEQ ID NO: 40293 - DNA, 15 bp, Homo sapiens
taaaccccaagtttg

SEQ ID NO: 40294 - DNA, 15 bp, Homo sapiens
aaaccccaagtttgg

SEQ ID NO: 40295 - DNA, 15 bp, Homo sapiens
aaccccaagtttggg

SEQ ID NO: 40296 - DNA, 15 bp, Homo sapiens
accccaagtttgggg

SEQ ID NO: 40297 - DNA, 15 bp, Homo sapiens
ccccaagtttgggga

SEQ ID NO: 40298 - DNA, 15 bp, Homo sapiens
cccaagtttggggaa

SEQ ID NO: 40299 - DNA, 15 bp, Homo sapiens
ccaagtttggggaat

SEQ ID NO: 40300 - DNA, 15 bp, Homo sapiens
caagtttggggaatg

SEQ ID NO: 40301 - DNA, 15 bp, Homo sapiens
aagtttggggaatgt

SEQ ID NO: 40302 - DNA, 15 bp, Homo sapiens
agtttggggaatgtg

SEQ ID NO: 40303 - DNA, 15 bp, Homo sapiens
gtttggggaatgtgc

SEQ ID NO: 40304 - DNA, 15 bp, Homo sapiens
tttggggaatgtgcc

SEQ ID NO: 40305 - DNA, 15 bp, Homo sapiens
ttggggaatgtgccc

SEQ ID NO: 40306 - DNA, 15 bp, Homo sapiens
tggggaatgtgcccc

SEQ ID NO: 40307 - DNA, 15 bp, Homo sapiens
ggggaatgtgcccct

SEQ ID NO: 40308 - DNA, 15 bp, Homo sapiens
gggaatgtgcccctt

SEQ ID NO: 40309 - DNA, 15 bp, Homo sapiens
ggaatgtgcccctta

SEQ ID NO: 40310 - DNA, 15 bp, Homo sapiens
gaatgtgccccttac

SEQ ID NO: 40311 - DNA, 15 bp, Homo sapiens
aatgtgccccttacc

SEQ ID NO: 40312 - DNA, 15 bp, Homo sapiens
atgtgccccttaccc

SEQ ID NO: 40313 - DNA, 15 bp, Homo sapiens
tgtgccccttacccc

SEQ ID NO: 40314 - DNA, 15 bp, Homo sapiens
gtgccccttacccca

SEQ ID NO: 40315 - DNA, 15 bp, Homo sapiens
tgccccttaccccac

SEQ ID NO: 40316 - DNA, 15 bp, Homo sapiens
gccccttaccccacc

SEQ ID NO: 40317 - DNA, 15 bp, Homo sapiens
ccccttaccccaccc

SEQ ID NO: 40318 - DNA, 15 bp, Homo sapiens
cccttaccccacccc

SEQ ID NO: 40319 - DNA, 15 bp, Homo sapiens
ccttaccccaccccc

SEQ ID NO: 40320 - DNA, 15 bp, Homo sapiens
cttaccccacccccc

SEQ ID NO: 40321 - DNA, 15 bp, Homo sapiens
ttaccccacccccca

SEQ ID NO: 40322 - DNA, 15 bp, Homo sapiens
taccccaccccccaa

SEQ ID NO: 40323 - DNA, 15 bp, Homo sapiens
accccaccccccaac

SEQ ID NO: 40324 - DNA, 15 bp, Homo sapiens
ccccaccccccaact

SEQ ID NO: 40325 - DNA, 15 bp, Homo sapiens
cccaccccccaactt

SEQ ID NO: 40326 - DNA, 15 bp, Homo sapiens
ccaccccccaacttc

SEQ ID NO: 40327 - DNA, 15 bp, Homo sapiens
caccccccaacttcc

SEQ ID NO: 40328 - DNA, 15 bp, Homo sapiens
accccccaacttcca

SEQ ID NO: 40329 - DNA, 15 bp, Homo sapiens
ccccccaacttccag

SEQ ID NO: 40330 - DNA, 15 bp, Homo sapiens
cccccaacttccagg

SEQ ID NO: 40331 - DNA, 15 bp, Homo sapiens
ccccaacttccaggc

SEQ ID NO: 40332 - DNA, 15 bp, Homo sapiens
cccaacttccaggcc

SEQ ID NO: 40333 - DNA, 15 bp, Homo sapiens
ccaacttccaggcca

SEQ ID NO: 40334 - DNA, 15 bp, Homo sapiens
caacttccaggccat

SEQ ID NO: 40335 - DNA, 15 bp, Homo sapiens
aacttccaggccatc

SEQ ID NO: 40336 - DNA, 15 bp, Homo sapiens
acttccaggccatcc

SEQ ID NO: 40337 - DNA, 15 bp, Homo sapiens
cttccaggccatcct

SEQ ID NO: 40338 - DNA, 15 bp, Homo sapiens
ttccaggccatcctg

SEQ ID NO: 40339 - DNA, 15 bp, Homo sapiens
tccaggccatcctgg

SEQ ID NO: 40340 - DNA, 15 bp, Homo sapiens
ccaggccatcctgga

SEQ ID NO: 40341 - DNA, 15 bp, Homo sapiens
caggccatcctggag

SEQ ID NO: 40342 - DNA, 15 bp, Homo sapiens
aggccatcctggagg

SEQ ID NO: 40343 - DNA, 15 bp, Homo sapiens
ggccatcctggaggc

SEQ ID NO: 40344 - DNA, 15 bp, Homo sapiens
gccatcctggaggct

SEQ ID NO: 40345 - DNA, 15 bp, Homo sapiens
ccatcctggaggctc

SEQ ID NO: 40346 - DNA, 15 bp, Homo sapiens
catcctggaggctcc

SEQ ID NO: 40347 - DNA, 15 bp, Homo sapiens
atcctggaggctcca

SEQ ID NO: 40348 - DNA, 15 bp, Homo sapiens
tcctggaggctccag

SEQ ID NO: 40349 - DNA, 15 bp, Homo sapiens
cctggaggctccaga

SEQ ID NO: 40350 - DNA, 15 bp, Homo sapiens
ctggaggctccagag

SEQ ID NO: 40351 - DNA, 15 bp, Homo sapiens
tggaggctccagaga

SEQ ID NO: 40352 - DNA, 15 bp, Homo sapiens
ggaggctccagagaa

SEQ ID NO: 40353 - DNA, 15 bp, Homo sapiens
gaggctccagagaag

SEQ ID NO: 40354 - DNA, 15 bp, Homo sapiens
aggctccagagaagc

SEQ ID NO: 40355 - DNA, 15 bp, Homo sapiens
ggctccagagaagca

SEQ ID NO: 40356 - DNA, 15 bp, Homo sapiens
gctccagagaagcag

SEQ ID NO: 40357 - DNA, 15 bp, Homo sapiens
ctccagagaagcagc

SEQ ID NO: 40358 - DNA, 15 bp, Homo sapiens
tccagagaagcagcg

SEQ ID NO: 40359 - DNA, 15 bp, Homo sapiens
ccagagaagcagcgg

SEQ ID NO: 40360 - DNA, 15 bp, Homo sapiens
cagagaagcagcgga

SEQ ID NO: 40361 - DNA, 15 bp, Homo sapiens
agagaagcagcggac

SEQ ID NO: 40362 - DNA, 15 bp, Homo sapiens
gagaagcagcggaca

SEQ ID NO: 40363 - DNA, 15 bp, Homo sapiens
agaagcagcggacac

SEQ ID NO: 40364 - DNA, 15 bp, Homo sapiens
gaagcagcggacact

SEQ ID NO: 40365 - DNA, 15 bp, Homo sapiens
aagcagcggacactc

SEQ ID NO: 40366 - DNA, 15 bp, Homo sapiens
agcagcggacactca

SEQ ID NO: 40367 - DNA, 15 bp, Homo sapiens
gcagcggacactcaa

SEQ ID NO: 40368 - DNA, 15 bp, Homo sapiens
cagcggacactcaat

SEQ ID NO: 40369 - DNA, 15 bp, Homo sapiens
agcggacactcaatg

SEQ ID NO: 40370 - DNA, 15 bp, Homo sapiens
gcggacactcaatga

SEQ ID NO: 40371 - DNA, 15 bp, Homo sapiens
cggacactcaatgag

SEQ ID NO: 40372 - DNA, 15 bp, Homo sapiens
ggacactcaatgaga

SEQ ID NO: 40373 - DNA, 15 bp, Homo sapiens
gacactcaatgagat

SEQ ID NO: 40374 - DNA, 15 bp, Homo sapiens
acactcaatgagatc

SEQ ID NO: 40375 - DNA, 15 bp, Homo sapiens
cactcaatgagatct

SEQ ID NO: 40376 - DNA, 15 bp, Homo sapiens
actcaatgagatcta

SEQ ID NO: 40377 - DNA, 15 bp, Homo sapiens
ctcaatgagatctac

SEQ ID NO: 40378 - DNA, 15 bp, Homo sapiens
tcaatgagatctacc

SEQ ID NO: 40379 - DNA, 15 bp, Homo sapiens
caatgagatctacca

SEQ ID NO: 40380 - DNA, 15 bp, Homo sapiens
aatgagatctaccac

SEQ ID NO: 40381 - DNA, 15 bp, Homo sapiens
atgagatctaccact

SEQ ID NO: 40382 - DNA, 15 bp, Homo sapiens
tgagatctaccactg

SEQ ID NO: 40383 - DNA, 15 bp, Homo sapiens
gagatctaccactgg

SEQ ID NO: 40384 - DNA, 15 bp, Homo sapiens
agatctaccactggt

SEQ ID NO: 40385 - DNA, 15 bp, Homo sapiens
gatctaccactggtt

SEQ ID NO: 40386 - DNA, 15 bp, Homo sapiens
atctaccactggttc

SEQ ID NO: 40387 - DNA, 15 bp, Homo sapiens
tctaccactggttca

SEQ ID NO: 40388 - DNA, 15 bp, Homo sapiens
ctaccactggttcac

SEQ ID NO: 40389 - DNA, 15 bp, Homo sapiens
taccactggttcaca

SEQ ID NO: 40390 - DNA, 15 bp, Homo sapiens
accactggttcacac

SEQ ID NO: 40391 - DNA, 15 bp, Homo sapiens
ccactggttcacacg

SEQ ID NO: 40392 - DNA, 15 bp, Homo sapiens
cactggttcacacgc

SEQ ID NO: 40393 - DNA, 15 bp, Homo sapiens
actggttcacacgca

SEQ ID NO: 40394 - DNA, 15 bp, Homo sapiens
ctggttcacacgcat

SEQ ID NO: 40395 - DNA, 15 bp, Homo sapiens
tggttcacacgcatg

SEQ ID NO: 40396 - DNA, 15 bp, Homo sapiens
ggttcacacgcatgt

SEQ ID NO: 40397 - DNA, 15 bp, Homo sapiens
gttcacacgcatgtt

SEQ ID NO: 40398 - DNA, 15 bp, Homo sapiens
ttcacacgcatgttt

SEQ ID NO: 40399 - DNA, 15 bp, Homo sapiens
tcacacgcatgtttg

SEQ ID NO: 40400 - DNA, 15 bp, Homo sapiens
cacacgcatgtttgc

SEQ ID NO: 40401 - DNA, 15 bp, Homo sapiens
acacgcatgtttgcc

SEQ ID NO: 40402 - DNA, 15 bp, Homo sapiens
cacgcatgtttgcct

SEQ ID NO: 40403 - DNA, 15 bp, Homo sapiens
acgcatgtttgcctt

SEQ ID NO: 40404 - DNA, 15 bp, Homo sapiens
cgcatgtttgccttc

SEQ ID NO: 40405 - DNA, 15 bp, Homo sapiens
gcatgtttgccttct

SEQ ID NO: 40406 - DNA, 15 bp, Homo sapiens
catgtttgccttctt

SEQ ID NO: 40407 - DNA, 15 bp, Homo sapiens
atgtttgccttcttc

SEQ ID NO: 40408 - DNA, 15 bp, Homo sapiens
tgtttgccttcttca

SEQ ID NO: 40409 - DNA, 15 bp, Homo sapiens
gtttgccttcttcag

SEQ ID NO: 40410 - DNA, 15 bp, Homo sapiens
tttgccttcttcaga

SEQ ID NO: 40411 - DNA, 15 bp, Homo sapiens
ttgccttcttcagaa

SEQ ID NO: 40412 - DNA, 15 bp, Homo sapiens
tgccttcttcagaaa

SEQ ID NO: 40413 - DNA, 15 bp, Homo sapiens
gccttcttcagaaac

SEQ ID NO: 40414 - DNA, 15 bp, Homo sapiens
ccttcttcagaaacc

SEQ ID NO: 40415 - DNA, 15 bp, Homo sapiens
cttcttcagaaacca

SEQ ID NO: 40416 - DNA, 15 bp, Homo sapiens
ttcttcagaaaccat

SEQ ID NO: 40417 - DNA, 15 bp, Homo sapiens
tcttcagaaaccatc

SEQ ID NO: 40418 - DNA, 15 bp, Homo sapiens
cttcagaaaccatcc

SEQ ID NO: 40419 - DNA, 15 bp, Homo sapiens
ttcagaaaccatcct

SEQ ID NO: 40420 - DNA, 15 bp, Homo sapiens
tcagaaaccatcctg

SEQ ID NO: 40421 - DNA, 15 bp, Homo sapiens
cagaaaccatcctgc

SEQ ID NO: 40422 - DNA, 15 bp, Homo sapiens
agaaaccatcctgcc

SEQ ID NO: 40423 - DNA, 15 bp, Homo sapiens
gaaaccatcctgcca

SEQ ID NO: 40424 - DNA, 15 bp, Homo sapiens
aaaccatcctgccac

SEQ ID NO: 40425 - DNA, 15 bp, Homo sapiens
aaccatcctgccacc

SEQ ID NO: 40426 - DNA, 15 bp, Homo sapiens
accatcctgccacct

SEQ ID NO: 40427 - DNA, 15 bp, Homo sapiens
ccatcctgccacctg

SEQ ID NO: 40428 - DNA, 15 bp, Homo sapiens
catcctgccacctgg

SEQ ID NO: 40429 - DNA, 15 bp, Homo sapiens
atcctgccacctgga

SEQ ID NO: 40430 - DNA, 15 bp, Homo sapiens
tcctgccacctggaa

SEQ ID NO: 40431 - DNA, 15 bp, Homo sapiens
cctgccacctggaag

SEQ ID NO: 40432 - DNA, 15 bp, Homo sapiens
ctgccacctggaagg

SEQ ID NO: 40433 - DNA, 15 bp, Homo sapiens
tgccacctggaaggt

SEQ ID NO: 40434 - DNA, 15 bp, Homo sapiens
gccacctggaaggtg

SEQ ID NO: 40435 - DNA, 15 bp, Homo sapiens
ccacctggaaggtga

SEQ ID NO: 40436 - DNA, 15 bp, Homo sapiens
cacctggaaggtgag

SEQ ID NO: 40437 - DNA, 15 bp, Homo sapiens
acctggaaggtgagc

SEQ ID NO: 40438 - DNA, 15 bp, Homo sapiens
cctggaaggtgagct

SEQ ID NO: 40439 - DNA, 15 bp, Homo sapiens
ctggaaggtgagctc

SEQ ID NO: 40440 - DNA, 15 bp, Homo sapiens
tggaaggtgagctcc

SEQ ID NO: 40441 - DNA, 15 bp, Homo sapiens
ggaaggtgagctcct

SEQ ID NO: 40442 - DNA, 15 bp, Homo sapiens
gaaggtgagctcctc

SEQ ID NO: 40443 - DNA, 15 bp, Homo sapiens
aaggtgagctcctct

SEQ ID NO: 40444 - DNA, 15 bp, Homo sapiens
aggtgagctcctctg

SEQ ID NO: 40445 - DNA, 15 bp, Homo sapiens
ggtgagctcctctga

SEQ ID NO: 40446 - DNA, 15 bp, Homo sapiens
gtgagctcctctgag

SEQ ID NO: 40447 - DNA, 15 bp, Homo sapiens
tgagctcctctgagg

SEQ ID NO: 40448 - DNA, 15 bp, Homo sapiens
gagctcctctgaggt

SEQ ID NO: 40449 - DNA, 15 bp, Homo sapiens
agctcctctgaggtg

SEQ ID NO: 40450 - DNA, 15 bp, Homo sapiens
gctcctctgaggtgg

SEQ ID NO: 40451 - DNA, 15 bp, Homo sapiens
ctcctctgaggtggc

SEQ ID NO: 40452 - DNA, 15 bp, Homo sapiens
tcctctgaggtggcg

SEQ ID NO: 40453 - DNA, 15 bp, Homo sapiens
cctctgaggtggcgg

SEQ ID NO: 40454 - DNA, 15 bp, Homo sapiens
ctctgaggtggcggt

SEQ ID NO: 40455 - DNA, 15 bp, Homo sapiens
tctgaggtggcggtg

SEQ ID NO: 40456 - DNA, 15 bp, Homo sapiens
ctgaggtggcggtga

SEQ ID NO: 40457 - DNA, 15 bp, Homo sapiens
tgaggtggcggtgac

SEQ ID NO: 40458 - DNA, 15 bp, Homo sapiens
gaggtggcggtgact

SEQ ID NO: 40459 - DNA, 15 bp, Homo sapiens
aggtggcggtgactg

SEQ ID NO: 40460 - DNA, 15 bp, Homo sapiens
ggtggcggtgactgg

SEQ ID NO: 40461 - DNA, 15 bp, Homo sapiens
gtggcggtgactggg

SEQ ID NO: 40462 - DNA, 15 bp, Homo sapiens
tggcggtgactggga

SEQ ID NO: 40463 - DNA, 15 bp, Homo sapiens
ggcggtgactgggat

SEQ ID NO: 40464 - DNA, 15 bp, Homo sapiens
gcggtgactgggatg

SEQ ID NO: 40465 - DNA, 15 bp, Homo sapiens
cggtgactgggatgg

SEQ ID NO: 40466 - DNA, 15 bp, Homo sapiens
ggtgactgggatggc

SEQ ID NO: 40467 - DNA, 15 bp, Homo sapiens
gtgactgggatggcc

SEQ ID NO: 40468 - DNA, 15 bp, Homo sapiens
tgactgggatggcct

SEQ ID NO: 40469 - DNA, 15 bp, Homo sapiens
gactgggatggcctc

SEQ ID NO: 40470 - DNA, 15 bp, Homo sapiens
actgggatggcctca

SEQ ID NO: 40471 - DNA, 15 bp, Homo sapiens
ctgggatggcctcaa

SEQ ID NO: 40472 - DNA, 15 bp, Homo sapiens
tgggatggcctcaag

SEQ ID NO: 40473 - DNA, 15 bp, Homo sapiens
gggatggcctcaagt

SEQ ID NO: 40474 - DNA, 15 bp, Homo sapiens
ggatggcctcaagtg

SEQ ID NO: 40475 - DNA, 15 bp, Homo sapiens
gatggcctcaagtgc

SEQ ID NO: 40476 - DNA, 15 bp, Homo sapiens
atggcctcaagtgcc

SEQ ID NO: 40477 - DNA, 15 bp, Homo sapiens
tggcctcaagtgcca

SEQ ID NO: 40478 - DNA, 15 bp, Homo sapiens
ggcctcaagtgccat

SEQ ID NO: 40479 - DNA, 15 bp, Homo sapiens
gcctcaagtgccatc

SEQ ID NO: 40480 - DNA, 15 bp, Homo sapiens
cctcaagtgccatcg

SEQ ID NO: 40481 - DNA, 15 bp, Homo sapiens
ctcaagtgccatcgc

SEQ ID NO: 40482 - DNA, 15 bp, Homo sapiens
tcaagtgccatcgca

SEQ ID NO: 40483 - DNA, 15 bp, Homo sapiens
caagtgccatcgcag

SEQ ID NO: 40484 - DNA, 15 bp, Homo sapiens
aagtgccatcgcagc

SEQ ID NO: 40485 - DNA, 15 bp, Homo sapiens
agtgccatcgcagct

SEQ ID NO: 40486 - DNA, 15 bp, Homo sapiens
gtgccatcgcagctc

SEQ ID NO: 40487 - DNA, 15 bp, Homo sapiens
tgccatcgcagctca

SEQ ID NO: 40488 - DNA, 15 bp, Homo sapiens
gccatcgcagctcaa

SEQ ID NO: 40489 - DNA, 15 bp, Homo sapiens
ccatcgcagctcaaa

SEQ ID NO: 40490 - DNA, 15 bp, Homo sapiens
catcgcagctcaaag

SEQ ID NO: 40491 - DNA, 15 bp, Homo sapiens
atcgcagctcaaagt

SEQ ID NO: 40492 - DNA, 15 bp, Homo sapiens
tcgcagctcaaagtg

SEQ ID NO: 40493 - DNA, 15 bp, Homo sapiens
cgcagctcaaagtgg

SEQ ID NO: 40494 - DNA, 15 bp, Homo sapiens
gcagctcaaagtggg

SEQ ID NO: 40495 - DNA, 15 bp, Homo sapiens
cagctcaaagtgggc

SEQ ID NO: 40496 - DNA, 15 bp, Homo sapiens
agctcaaagtgggca

SEQ ID NO: 40497 - DNA, 15 bp, Homo sapiens
gctcaaagtgggcag

SEQ ID NO: 40498 - DNA, 15 bp, Homo sapiens
ctcaaagtgggcagg

SEQ ID NO: 40499 - DNA, 15 bp, Homo sapiens
tcaaagtgggcaggc

SEQ ID NO: 40500 - DNA, 15 bp, Homo sapiens
caaagtgggcaggcc

SEQ ID NO: 40501 - DNA, 15 bp, Homo sapiens
aaagtgggcaggcct

SEQ ID NO: 40502 - DNA, 15 bp, Homo sapiens
aagtgggcaggcctg

SEQ ID NO: 40503 - DNA, 15 bp, Homo sapiens
agtgggcaggcctgg

SEQ ID NO: 40504 - DNA, 15 bp, Homo sapiens
gtgggcaggcctggg

SEQ ID NO: 40505 - DNA, 15 bp, Homo sapiens
tgggcaggcctgggt

SEQ ID NO: 40506 - DNA, 15 bp, Homo sapiens
gggcaggcctgggtc

SEQ ID NO: 40507 - DNA, 15 bp, Homo sapiens
ggcaggcctgggtct

SEQ ID NO: 40508 - DNA, 15 bp, Homo sapiens
gcaggcctgggtctg

SEQ ID NO: 40509 - DNA, 15 bp, Homo sapiens
caggcctgggtctgg

SEQ ID NO: 40510 - DNA, 15 bp, Homo sapiens
aggcctgggtctggg

SEQ ID NO: 40511 - DNA, 15 bp, Homo sapiens
ggcctgggtctgggc

SEQ ID NO: 40512 - DNA, 15 bp, Homo sapiens
gcctgggtctgggct

SEQ ID NO: 40513 - DNA, 15 bp, Homo sapiens
cctgggtctgggctc

SEQ ID NO: 40514 - DNA, 15 bp, Homo sapiens
ctgggtctgggctca

SEQ ID NO: 40515 - DNA, 15 bp, Homo sapiens
tgggtctgggctcat

SEQ ID NO: 40516 - DNA, 15 bp, Homo sapiens
gggtctgggctcata

SEQ ID NO: 40517 - DNA, 15 bp, Homo sapiens
ggtctgggctcatag

SEQ ID NO: 40518 - DNA, 15 bp, Homo sapiens
gtctgggctcatagg

SEQ ID NO: 40519 - DNA, 15 bp, Homo sapiens
tctgggctcataggc

SEQ ID NO: 40520 - DNA, 15 bp, Homo sapiens
ctgggctcataggca

SEQ ID NO: 40521 - DNA, 15 bp, Homo sapiens
tgggctcataggcac

SEQ ID NO: 40522 - DNA, 15 bp, Homo sapiens
gggctcataggcaca

SEQ ID NO: 40523 - DNA, 15 bp, Homo sapiens
ggctcataggcacat

SEQ ID NO: 40524 - DNA, 15 bp, Homo sapiens
gctcataggcacatt

SEQ ID NO: 40525 - DNA, 15 bp, Homo sapiens
ctcataggcacattg

SEQ ID NO: 40526 - DNA, 15 bp, Homo sapiens
tcataggcacattgg

SEQ ID NO: 40527 - DNA, 15 bp, Homo sapiens
cataggcacattggg

SEQ ID NO: 40528 - DNA, 15 bp, Homo sapiens
ataggcacattgggg

SEQ ID NO: 40529 - DNA, 15 bp, Homo sapiens
taggcacattgggga

SEQ ID NO: 40530 - DNA, 15 bp, Homo sapiens
aggcacattggggag

SEQ ID NO: 40531 - DNA, 15 bp, Homo sapiens
ggcacattggggagg

SEQ ID NO: 40532 - DNA, 15 bp, Homo sapiens
gcacattggggagga

SEQ ID NO: 40533 - DNA, 15 bp, Homo sapiens
cacattggggaggaa

SEQ ID NO: 40534 - DNA, 15 bp, Homo sapiens
acattggggaggaac

SEQ ID NO: 40535 - DNA, 15 bp, Homo sapiens
cattggggaggaacg

SEQ ID NO: 40536 - DNA, 15 bp, Homo sapiens
attggggaggaacgg

SEQ ID NO: 40537 - DNA, 15 bp, Homo sapiens
ttggggaggaacggg

SEQ ID NO: 40538 - DNA, 15 bp, Homo sapiens
tggggaggaacggga

SEQ ID NO: 40539 - DNA, 15 bp, Homo sapiens
ggggaggaacgggat

SEQ ID NO: 40540 - DNA, 15 bp, Homo sapiens
gggaggaacgggatg

SEQ ID NO: 40541 - DNA, 15 bp, Homo sapiens
ggaggaacgggatgt

SEQ ID NO: 40542 - DNA, 15 bp, Homo sapiens
gaggaacgggatgtg

SEQ ID NO: 40543 - DNA, 15 bp, Homo sapiens
aggaacgggatgtgg

SEQ ID NO: 40544 - DNA, 15 bp, Homo sapiens
ggaacgggatgtggg

SEQ ID NO: 40545 - DNA, 15 bp, Homo sapiens
gaacgggatgtgggt

SEQ ID NO: 40546 - DNA, 15 bp, Homo sapiens
aacgggatgtgggtt

SEQ ID NO: 40547 - DNA, 15 bp, Homo sapiens
acgggatgtgggttg

SEQ ID NO: 40548 - DNA, 15 bp, Homo sapiens
cgggatgtgggttgt

SEQ ID NO: 40549 - DNA, 15 bp, Homo sapiens
gggatgtgggttgtt

SEQ ID NO: 40550 - DNA, 15 bp, Homo sapiens
ggatgtgggttgttg

SEQ ID NO: 40551 - DNA, 15 bp, Homo sapiens
gatgtgggttgttgg

SEQ ID NO: 40552 - DNA, 15 bp, Homo sapiens
atgtgggttgttggt

SEQ ID NO: 40553 - DNA, 15 bp, Homo sapiens
tgtgggttgttggtg

SEQ ID NO: 40554 - DNA, 15 bp, Homo sapiens
gtgggttgttggtgg

SEQ ID NO: 40555 - DNA, 15 bp, Homo sapiens
tgggttgttggtggt

SEQ ID NO: 40556 - DNA, 15 bp, Homo sapiens
gggttgttggtggtg

SEQ ID NO: 40557 - DNA, 15 bp, Homo sapiens
ggttgttggtggtgg

SEQ ID NO: 40558 - DNA, 15 bp, Homo sapiens
gttgttggtggtggc

SEQ ID NO: 40559 - DNA, 15 bp, Homo sapiens
ttgttggtggtggct

SEQ ID NO: 40560 - DNA, 15 bp, Homo sapiens
tgttggtggtggctg

SEQ ID NO: 40561 - DNA, 15 bp, Homo sapiens
gttggtggtggctgc

SEQ ID NO: 40562 - DNA, 15 bp, Homo sapiens
ttggtggtggctgct

SEQ ID NO: 40563 - DNA, 15 bp, Homo sapiens
tggtggtggctgctg

SEQ ID NO: 40564 - DNA, 15 bp, Homo sapiens
ggtggtggctgctgg

SEQ ID NO: 40565 - DNA, 15 bp, Homo sapiens
gtggtggctgctggc

SEQ ID NO: 40566 - DNA, 15 bp, Homo sapiens
tggtggctgctggcc

SEQ ID NO: 40567 - DNA, 15 bp, Homo sapiens
ggtggctgctggcct

SEQ ID NO: 40568 - DNA, 15 bp, Homo sapiens
gtggctgctggcctc

SEQ ID NO: 40569 - DNA, 15 bp, Homo sapiens
tggctgctggcctca

SEQ ID NO: 40570 - DNA, 15 bp, Homo sapiens
ggctgctggcctcag

SEQ ID NO: 40571 - DNA, 15 bp, Homo sapiens
gctgctggcctcaga

SEQ ID NO: 40572 - DNA, 15 bp, Homo sapiens
ctgctggcctcagag

SEQ ID NO: 40573 - DNA, 15 bp, Homo sapiens
tgctggcctcagagg

SEQ ID NO: 40574 - DNA, 15 bp, Homo sapiens
gctggcctcagaggt

SEQ ID NO: 40575 - DNA, 15 bp, Homo sapiens
ctggcctcagaggtt

SEQ ID NO: 40576 - DNA, 15 bp, Homo sapiens
tggcctcagaggttg

SEQ ID NO: 40577 - DNA, 15 bp, Homo sapiens
ggcctcagaggttga

SEQ ID NO: 40578 - DNA, 15 bp, Homo sapiens
gcctcagaggttgac

SEQ ID NO: 40579 - DNA, 15 bp, Homo sapiens
cctcagaggttgacg

SEQ ID NO: 40580 - DNA, 15 bp, Homo sapiens
ctcagaggttgacgc

SEQ ID NO: 40581 - DNA, 15 bp, Homo sapiens
tcagaggttgacgcc

SEQ ID NO: 40582 - DNA, 15 bp, Homo sapiens
cagaggttgacgccc

SEQ ID NO: 40583 - DNA, 15 bp, Homo sapiens
agaggttgacgccca

SEQ ID NO: 40584 - DNA, 15 bp, Homo sapiens
gaggttgacgcccac

SEQ ID NO: 40585 - DNA, 15 bp, Homo sapiens
aggttgacgcccacc

SEQ ID NO: 40586 - DNA, 15 bp, Homo sapiens
ggttgacgcccacct

SEQ ID NO: 40587 - DNA, 15 bp, Homo sapiens
gttgacgcccacctg

SEQ ID NO: 40588 - DNA, 15 bp, Homo sapiens
ttgacgcccacctgc

SEQ ID NO: 40589 - DNA, 15 bp, Homo sapiens
tgacgcccacctgct

SEQ ID NO: 40590 - DNA, 15 bp, Homo sapiens
gacgcccacctgctc

SEQ ID NO: 40591 - DNA, 15 bp, Homo sapiens
acgcccacctgctcc

SEQ ID NO: 40592 - DNA, 15 bp, Homo sapiens
cgcccacctgctccc

SEQ ID NO: 40593 - DNA, 15 bp, Homo sapiens
gcccacctgctccct

SEQ ID NO: 40594 - DNA, 15 bp, Homo sapiens
cccacctgctccctg

SEQ ID NO: 40595 - DNA, 15 bp, Homo sapiens
ccacctgctccctgt

SEQ ID NO: 40596 - DNA, 15 bp, Homo sapiens
cacctgctccctgtc

SEQ ID NO: 40597 - DNA, 15 bp, Homo sapiens
acctgctccctgtcc

SEQ ID NO: 40598 - DNA, 15 bp, Homo sapiens
cctgctccctgtccc

SEQ ID NO: 40599 - DNA, 15 bp, Homo sapiens
ctgctccctgtcccc

SEQ ID NO: 40600 - DNA, 15 bp, Homo sapiens
tgctccctgtccccg

SEQ ID NO: 40601 - DNA, 15 bp, Homo sapiens
gctccctgtccccgg

SEQ ID NO: 40602 - DNA, 15 bp, Homo sapiens
ctccctgtccccggc

SEQ ID NO: 40603 - DNA, 15 bp, Homo sapiens
tccctgtccccggcc

SEQ ID NO: 40604 - DNA, 15 bp, Homo sapiens
ccctgtccccggcct

SEQ ID NO: 40605 - DNA, 15 bp, Homo sapiens
cctgtccccggcctt

SEQ ID NO: 40606 - DNA, 15 bp, Homo sapiens
ctgtccccggccttc

SEQ ID NO: 40607 - DNA, 15 bp, Homo sapiens
tgtccccggccttcc

SEQ ID NO: 40608 - DNA, 15 bp, Homo sapiens
gtccccggccttcca

SEQ ID NO: 40609 - DNA, 15 bp, Homo sapiens
tccccggccttccac

SEQ ID NO: 40610 - DNA, 15 bp, Homo sapiens
ccccggccttccaca

SEQ ID NO: 40611 - DNA, 15 bp, Homo sapiens
cccggccttccacag

SEQ ID NO: 40612 - DNA, 15 bp, Homo sapiens
ccggccttccacaga

SEQ ID NO: 40613 - DNA, 15 bp, Homo sapiens
cggccttccacagaa

SEQ ID NO: 40614 - DNA, 15 bp, Homo sapiens
ggccttccacagaac

SEQ ID NO: 40615 - DNA, 15 bp, Homo sapiens
gccttccacagaacg

SEQ ID NO: 40616 - DNA, 15 bp, Homo sapiens
ccttccacagaacgc

SEQ ID NO: 40617 - DNA, 15 bp, Homo sapiens
cttccacagaacgcc

SEQ ID NO: 40618 - DNA, 15 bp, Homo sapiens
ttccacagaacgcca

SEQ ID NO: 40619 - DNA, 15 bp, Homo sapiens
tccacagaacgccat

SEQ ID NO: 40620 - DNA, 15 bp, Homo sapiens
ccacagaacgccatc

SEQ ID NO: 40621 - DNA, 15 bp, Homo sapiens
cacagaacgccatcc

SEQ ID NO: 40622 - DNA, 15 bp, Homo sapiens
acagaacgccatccg

SEQ ID NO: 40623 - DNA, 15 bp, Homo sapiens
cagaacgccatccgc

SEQ ID NO: 40624 - DNA, 15 bp, Homo sapiens
agaacgccatccgcc

SEQ ID NO: 40625 - DNA, 15 bp, Homo sapiens
gaacgccatccgcca

SEQ ID NO: 40626 - DNA, 15 bp, Homo sapiens
aacgccatccgccac

SEQ ID NO: 40627 - DNA, 15 bp, Homo sapiens
acgccatccgccaca

SEQ ID NO: 40628 - DNA, 15 bp, Homo sapiens
cgccatccgccacaa

SEQ ID NO: 40629 - DNA, 15 bp, Homo sapiens
gccatccgccacaac

SEQ ID NO: 40630 - DNA, 15 bp, Homo sapiens
ccatccgccacaacc

SEQ ID NO: 40631 - DNA, 15 bp, Homo sapiens
catccgccacaacct

SEQ ID NO: 40632 - DNA, 15 bp, Homo sapiens
atccgccacaacctg

SEQ ID NO: 40633 - DNA, 15 bp, Homo sapiens
tccgccacaacctga

SEQ ID NO: 40634 - DNA, 15 bp, Homo sapiens
ccgccacaacctgag

SEQ ID NO: 40635 - DNA, 15 bp, Homo sapiens
cgccacaacctgagt

SEQ ID NO: 40636 - DNA, 15 bp, Homo sapiens
gccacaacctgagtc

SEQ ID NO: 40637 - DNA, 15 bp, Homo sapiens
ccacaacctgagtct

SEQ ID NO: 40638 - DNA, 15 bp, Homo sapiens
cacaacctgagtctg

SEQ ID NO: 40639 - DNA, 15 bp, Homo sapiens
acaacctgagtctgc

SEQ ID NO: 40640 - DNA, 15 bp, Homo sapiens
caacctgagtctgca

SEQ ID NO: 40641 - DNA, 15 bp, Homo sapiens
aacctgagtctgcac

SEQ ID NO: 40642 - DNA, 15 bp, Homo sapiens
acctgagtctgcaca

SEQ ID NO: 40643 - DNA, 15 bp, Homo sapiens
cctgagtctgcacaa

SEQ ID NO: 40644 - DNA, 15 bp, Homo sapiens
ctgagtctgcacaag

SEQ ID NO: 40645 - DNA, 15 bp, Homo sapiens
tgagtctgcacaagt

SEQ ID NO: 40646 - DNA, 15 bp, Homo sapiens
gagtctgcacaagtg

SEQ ID NO: 40647 - DNA, 15 bp, Homo sapiens
agtctgcacaagtgc

SEQ ID NO: 40648 - DNA, 15 bp, Homo sapiens
gtctgcacaagtgct

SEQ ID NO: 40649 - DNA, 15 bp, Homo sapiens
tctgcacaagtgctt

SEQ ID NO: 40650 - DNA, 15 bp, Homo sapiens
ctgcacaagtgcttt

SEQ ID NO: 40651 - DNA, 15 bp, Homo sapiens
tgcacaagtgctttg

SEQ ID NO: 40652 - DNA, 15 bp, Homo sapiens
gcacaagtgctttgt

SEQ ID NO: 40653 - DNA, 15 bp, Homo sapiens
cacaagtgctttgtg

SEQ ID NO: 40654 - DNA, 15 bp, Homo sapiens
acaagtgctttgtgc

SEQ ID NO: 40655 - DNA, 15 bp, Homo sapiens
caagtgctttgtgcg

SEQ ID NO: 40656 - DNA, 15 bp, Homo sapiens
aagtgctttgtgcgg

SEQ ID NO: 40657 - DNA, 15 bp, Homo sapiens
agtgctttgtgcggg

SEQ ID NO: 40658 - DNA, 15 bp, Homo sapiens
gtgctttgtgcgggt

SEQ ID NO: 40659 - DNA, 15 bp, Homo sapiens
tgctttgtgcgggtg

SEQ ID NO: 40660 - DNA, 15 bp, Homo sapiens
gctttgtgcgggtgg

SEQ ID NO: 40661 - DNA, 15 bp, Homo sapiens
ctttgtgcgggtgga

SEQ ID NO: 40662 - DNA, 15 bp, Homo sapiens
tttgtgcgggtggag

SEQ ID NO: 40663 - DNA, 15 bp, Homo sapiens
ttgtgcgggtggaga

SEQ ID NO: 40664 - DNA, 15 bp, Homo sapiens
tgtgcgggtggagag

SEQ ID NO: 40665 - DNA, 15 bp, Homo sapiens
gtgcgggtggagagc

SEQ ID NO: 40666 - DNA, 15 bp, Homo sapiens
tgcgggtggagagcg

SEQ ID NO: 40667 - DNA, 15 bp, Homo sapiens
gcgggtggagagcga

SEQ ID NO: 40668 - DNA, 15 bp, Homo sapiens
cgggtggagagcgag

SEQ ID NO: 40669 - DNA, 15 bp, Homo sapiens
gggtggagagcgaga

SEQ ID NO: 40670 - DNA, 15 bp, Homo sapiens
ggtggagagcgagaa

SEQ ID NO: 40671 - DNA, 15 bp, Homo sapiens
gtggagagcgagaag

SEQ ID NO: 40672 - DNA, 15 bp, Homo sapiens
tggagagcgagaagg

SEQ ID NO: 40673 - DNA, 15 bp, Homo sapiens
ggagagcgagaaggg

SEQ ID NO: 40674 - DNA, 15 bp, Homo sapiens
gagagcgagaagggg

SEQ ID NO: 40675 - DNA, 15 bp, Homo sapiens
agagcgagaaggggg

SEQ ID NO: 40676 - DNA, 15 bp, Homo sapiens
gagcgagaagggggc

SEQ ID NO: 40677 - DNA, 15 bp, Homo sapiens
agcgagaagggggct

SEQ ID NO: 40678 - DNA, 15 bp, Homo sapiens
gcgagaagggggctg

SEQ ID NO: 40679 - DNA, 15 bp, Homo sapiens
cgagaagggggctgt

SEQ ID NO: 40680 - DNA, 15 bp, Homo sapiens
gagaagggggctgtg

SEQ ID NO: 40681 - DNA, 15 bp, Homo sapiens
agaagggggctgtgt

SEQ ID NO: 40682 - DNA, 15 bp, Homo sapiens
gaagggggctgtgtg

SEQ ID NO: 40683 - DNA, 15 bp, Homo sapiens
aagggggctgtgtgg

SEQ ID NO: 40684 - DNA, 15 bp, Homo sapiens
agggggctgtgtgga

SEQ ID NO: 40685 - DNA, 15 bp, Homo sapiens
gggggctgtgtggac

SEQ ID NO: 40686 - DNA, 15 bp, Homo sapiens
ggggctgtgtggacc

SEQ ID NO: 40687 - DNA, 15 bp, Homo sapiens
gggctgtgtggaccg

SEQ ID NO: 40688 - DNA, 15 bp, Homo sapiens
ggctgtgtggaccgt

SEQ ID NO: 40689 - DNA, 15 bp, Homo sapiens
gctgtgtggaccgtg

SEQ ID NO: 40690 - DNA, 15 bp, Homo sapiens
ctgtgtggaccgtgg

SEQ ID NO: 40691 - DNA, 15 bp, Homo sapiens
tgtgtggaccgtgga

SEQ ID NO: 40692 - DNA, 15 bp, Homo sapiens
gtgtggaccgtggat

SEQ ID NO: 40693 - DNA, 15 bp, Homo sapiens
tgtggaccgtggatg

SEQ ID NO: 40694 - DNA, 15 bp, Homo sapiens
gtggaccgtggatga

SEQ ID NO: 40695 - DNA, 15 bp, Homo sapiens
tggaccgtggatgag

SEQ ID NO: 40696 - DNA, 15 bp, Homo sapiens
ggaccgtggatgagc

SEQ ID NO: 40697 - DNA, 15 bp, Homo sapiens
gaccgtggatgagct

SEQ ID NO: 40698 - DNA, 15 bp, Homo sapiens
accgtggatgagctg

SEQ ID NO: 40699 - DNA, 15 bp, Homo sapiens
ccgtggatgagctgg

SEQ ID NO: 40700 - DNA, 15 bp, Homo sapiens
cgtggatgagctgga

SEQ ID NO: 40701 - DNA, 15 bp, Homo sapiens
gtggatgagctggag

SEQ ID NO: 40702 - DNA, 15 bp, Homo sapiens
tggatgagctggagt

SEQ ID NO: 40703 - DNA, 15 bp, Homo sapiens
ggatgagctggagtt

SEQ ID NO: 40704 - DNA, 15 bp, Homo sapiens
gatgagctggagttc

SEQ ID NO: 40705 - DNA, 15 bp, Homo sapiens
atgagctggagttcc

SEQ ID NO: 40706 - DNA, 15 bp, Homo sapiens
tgagctggagttccg

SEQ ID NO: 40707 - DNA, 15 bp, Homo sapiens
gagctggagttccgc

SEQ ID NO: 40708 - DNA, 15 bp, Homo sapiens
agctggagttccgca

SEQ ID NO: 40709 - DNA, 15 bp, Homo sapiens
gctggagttccgcaa

SEQ ID NO: 40710 - DNA, 15 bp, Homo sapiens
ctggagttccgcaag

SEQ ID NO: 40711 - DNA, 15 bp, Homo sapiens
tggagttccgcaaga

SEQ ID NO: 40712 - DNA, 15 bp, Homo sapiens
ggagttccgcaagaa

SEQ ID NO: 40713 - DNA, 15 bp, Homo sapiens
gagttccgcaagaaa

SEQ ID NO: 40714 - DNA, 15 bp, Homo sapiens
agttccgcaagaaac

SEQ ID NO: 40715 - DNA, 15 bp, Homo sapiens
gttccgcaagaaacg

SEQ ID NO: 40716 - DNA, 15 bp, Homo sapiens
ttccgcaagaaacgg

SEQ ID NO: 40717 - DNA, 15 bp, Homo sapiens
tccgcaagaaacgga

SEQ ID NO: 40718 - DNA, 15 bp, Homo sapiens
ccgcaagaaacggag

SEQ ID NO: 40719 - DNA, 15 bp, Homo sapiens
cgcaagaaacggagc

SEQ ID NO: 40720 - DNA, 15 bp, Homo sapiens
gcaagaaacggagcc

SEQ ID NO: 40721 - DNA, 15 bp, Homo sapiens
caagaaacggagcca

SEQ ID NO: 40722 - DNA, 15 bp, Homo sapiens
aagaaacggagccag

SEQ ID NO: 40723 - DNA, 15 bp, Homo sapiens
agaaacggagccaga

SEQ ID NO: 40724 - DNA, 15 bp, Homo sapiens
gaaacggagccagag

SEQ ID NO: 40725 - DNA, 15 bp, Homo sapiens
aaacggagccagagg

SEQ ID NO: 40726 - DNA, 15 bp, Homo sapiens
aacggagccagaggc

SEQ ID NO: 40727 - DNA, 15 bp, Homo sapiens
acggagccagaggcc

SEQ ID NO: 40728 - DNA, 15 bp, Homo sapiens
cggagccagaggccc

SEQ ID NO: 40729 - DNA, 15 bp, Homo sapiens
ggagccagaggccca

SEQ ID NO: 40730 - DNA, 15 bp, Homo sapiens
gagccagaggcccag

SEQ ID NO: 40731 - DNA, 15 bp, Homo sapiens
agccagaggcccagc

SEQ ID NO: 40732 - DNA, 15 bp, Homo sapiens
gccagaggcccagca

SEQ ID NO: 40733 - DNA, 15 bp, Homo sapiens
ccagaggcccagcag

SEQ ID NO: 40734 - DNA, 15 bp, Homo sapiens
cagaggcccagcagg

SEQ ID NO: 40735 - DNA, 15 bp, Homo sapiens
agaggcccagcaggt

SEQ ID NO: 40736 - DNA, 15 bp, Homo sapiens
gaggcccagcaggtg

SEQ ID NO: 40737 - DNA, 15 bp, Homo sapiens
aggcccagcaggtgt

SEQ ID NO: 40738 - DNA, 15 bp, Homo sapiens
ggcccagcaggtgtt

SEQ ID NO: 40739 - DNA, 15 bp, Homo sapiens
gcccagcaggtgttc

SEQ ID NO: 40740 - DNA, 15 bp, Homo sapiens
cccagcaggtgttcc

SEQ ID NO: 40741 - DNA, 15 bp, Homo sapiens
ccagcaggtgttcca

SEQ ID NO: 40742 - DNA, 15 bp, Homo sapiens
cagcaggtgttccaa

SEQ ID NO: 40743 - DNA, 15 bp, Homo sapiens
agcaggtgttccaac

SEQ ID NO: 40744 - DNA, 15 bp, Homo sapiens
gcaggtgttccaacc

SEQ ID NO: 40745 - DNA, 15 bp, Homo sapiens
caggtgttccaaccc

SEQ ID NO: 40746 - DNA, 15 bp, Homo sapiens
aggtgttccaaccct

SEQ ID NO: 40747 - DNA, 15 bp, Homo sapiens
ggtgttccaacccta

SEQ ID NO: 40748 - DNA, 15 bp, Homo sapiens
gtgttccaaccctac

SEQ ID NO: 40749 - DNA, 15 bp, Homo sapiens
tgttccaaccctaca

SEQ ID NO: 40750 - DNA, 15 bp, Homo sapiens
gttccaaccctacac

SEQ ID NO: 40751 - DNA, 15 bp, Homo sapiens
ttccaaccctacacc

SEQ ID NO: 40752 - DNA, 15 bp, Homo sapiens
tccaaccctacacct

SEQ ID NO: 40753 - DNA, 15 bp, Homo sapiens
ccaaccctacacctg

SEQ ID NO: 40754 - DNA, 15 bp, Homo sapiens
caaccctacacctgg

SEQ ID NO: 40755 - DNA, 15 bp, Homo sapiens
aaccctacacctggc

SEQ ID NO: 40756 - DNA, 15 bp, Homo sapiens
accctacacctggcc

SEQ ID NO: 40757 - DNA, 15 bp, Homo sapiens
ccctacacctggccc

SEQ ID NO: 40758 - DNA, 15 bp, Homo sapiens
cctacacctggcccc

SEQ ID NO: 40759 - DNA, 15 bp, Homo sapiens
ctacacctggcccct

SEQ ID NO: 40760 - DNA, 15 bp, Homo sapiens
tacacctggcccctg

SEQ ID NO: 40761 - DNA, 15 bp, Homo sapiens
acacctggcccctga

SEQ ID NO: 40762 - DNA, 15 bp, Homo sapiens
cacctggcccctgac

SEQ ID NO: 40763 - DNA, 15 bp, Homo sapiens
acctggcccctgacc

SEQ ID NO: 40764 - DNA, 15 bp, Homo sapiens
cctggcccctgacct

SEQ ID NO: 40765 - DNA, 15 bp, Homo sapiens
ctggcccctgacctc

SEQ ID NO: 40766 - DNA, 15 bp, Homo sapiens
tggcccctgacctca

SEQ ID NO: 40767 - DNA, 15 bp, Homo sapiens
ggcccctgacctcaa

SEQ ID NO: 40768 - DNA, 15 bp, Homo sapiens
gcccctgacctcaag

SEQ ID NO: 40769 - DNA, 15 bp, Homo sapiens
cccctgacctcaaga

SEQ ID NO: 40770 - DNA, 15 bp, Homo sapiens
ccctgacctcaagat

SEQ ID NO: 40771 - DNA, 15 bp, Homo sapiens
cctgacctcaagatc

SEQ ID NO: 40772 - DNA, 15 bp, Homo sapiens
ctgacctcaagatca

SEQ ID NO: 40773 - DNA, 15 bp, Homo sapiens
tgacctcaagatcaa

SEQ ID NO: 40774 - DNA, 15 bp, Homo sapiens
gacctcaagatcaag

SEQ ID NO: 40775 - DNA, 15 bp, Homo sapiens
acctcaagatcaagg

SEQ ID NO: 40776 - DNA, 15 bp, Homo sapiens
cctcaagatcaagga

SEQ ID NO: 40777 - DNA, 15 bp, Homo sapiens
ctcaagatcaaggaa

SEQ ID NO: 40778 - DNA, 15 bp, Homo sapiens
tcaagatcaaggaaa

SEQ ID NO: 40779 - DNA, 15 bp, Homo sapiens
caagatcaaggaaag

SEQ ID NO: 40780 - DNA, 15 bp, Homo sapiens
aagatcaaggaaagg

SEQ ID NO: 40781 - DNA, 15 bp, Homo sapiens
agatcaaggaaagga

SEQ ID NO: 40782 - DNA, 15 bp, Homo sapiens
gatcaaggaaaggag

SEQ ID NO: 40783 - DNA, 15 bp, Homo sapiens
atcaaggaaaggagg

SEQ ID NO: 40784 - DNA, 15 bp, Homo sapiens
tcaaggaaaggagga

SEQ ID NO: 40785 - DNA, 15 bp, Homo sapiens
caaggaaaggaggat

SEQ ID NO: 40786 - DNA, 15 bp, Homo sapiens
aaggaaaggaggatg

SEQ ID NO: 40787 - DNA, 15 bp, Homo sapiens
aggaaaggaggatgg

SEQ ID NO: 40788 - DNA, 15 bp, Homo sapiens
ggaaaggaggatgga

SEQ ID NO: 40789 - DNA, 15 bp, Homo sapiens
gaaaggaggatggac

SEQ ID NO: 40790 - DNA, 15 bp, Homo sapiens
aaaggaggatggacg

SEQ ID NO: 40791 - DNA, 15 bp, Homo sapiens
aaggaggatggacga

SEQ ID NO: 40792 - DNA, 15 bp, Homo sapiens
aggaggatggacgaa

SEQ ID NO: 40793 - DNA, 15 bp, Homo sapiens
ggaggatggacgaac

SEQ ID NO: 40794 - DNA, 15 bp, Homo sapiens
gaggatggacgaaca

SEQ ID NO: 40795 - DNA, 15 bp, Homo sapiens
aggatggacgaacag

SEQ ID NO: 40796 - DNA, 15 bp, Homo sapiens
ggatggacgaacagg

SEQ ID NO: 40797 - DNA, 15 bp, Homo sapiens
gatggacgaacaggg

SEQ ID NO: 40798 - DNA, 15 bp, Homo sapiens
atggacgaacagggg

SEQ ID NO: 40799 - DNA, 15 bp, Homo sapiens
tggacgaacaggggc

SEQ ID NO: 40800 - DNA, 15 bp, Homo sapiens
ggacgaacaggggcc

SEQ ID NO: 40801 - DNA, 15 bp, Homo sapiens
gacgaacaggggcca

SEQ ID NO: 40802 - DNA, 15 bp, Homo sapiens
acgaacaggggccaa

SEQ ID NO: 40803 - DNA, 15 bp, Homo sapiens
cgaacaggggccaaa

SEQ ID NO: 40804 - DNA, 15 bp, Homo sapiens
gaacaggggccaaac

SEQ ID NO: 40805 - DNA, 15 bp, Homo sapiens
aacaggggccaaact

SEQ ID NO: 40806 - DNA, 15 bp, Homo sapiens
acaggggccaaactg

SEQ ID NO: 40807 - DNA, 15 bp, Homo sapiens
caggggccaaactgg

SEQ ID NO: 40808 - DNA, 15 bp, Homo sapiens
aggggccaaactggt

SEQ ID NO: 40809 - DNA, 15 bp, Homo sapiens
ggggccaaactggtg

SEQ ID NO: 40810 - DNA, 15 bp, Homo sapiens
gggccaaactggtgg

SEQ ID NO: 40811 - DNA, 15 bp, Homo sapiens
ggccaaactggtggg

SEQ ID NO: 40812 - DNA, 15 bp, Homo sapiens
gccaaactggtggga

SEQ ID NO: 40813 - DNA, 15 bp, Homo sapiens
ccaaactggtgggag

SEQ ID NO: 40814 - DNA, 15 bp, Homo sapiens
caaactggtgggagg

SEQ ID NO: 40815 - DNA, 15 bp, Homo sapiens
aaactggtgggaggc

SEQ ID NO: 40816 - DNA, 15 bp, Homo sapiens
aactggtgggaggca

SEQ ID NO: 40817 - DNA, 15 bp, Homo sapiens
actggtgggaggcag

SEQ ID NO: 40818 - DNA, 15 bp, Homo sapiens
ctggtgggaggcaga

SEQ ID NO: 40819 - DNA, 15 bp, Homo sapiens
tggtgggaggcagag

SEQ ID NO: 40820 - DNA, 15 bp, Homo sapiens
ggtgggaggcagagg

SEQ ID NO: 40821 - DNA, 15 bp, Homo sapiens
gtgggaggcagaggt

SEQ ID NO: 40822 - DNA, 15 bp, Homo sapiens
tgggaggcagaggtg

SEQ ID NO: 40823 - DNA, 15 bp, Homo sapiens
gggaggcagaggtgg

SEQ ID NO: 40824 - DNA, 15 bp, Homo sapiens
ggaggcagaggtggt

SEQ ID NO: 40825 - DNA, 15 bp, Homo sapiens
gaggcagaggtggtg

SEQ ID NO: 40826 - DNA, 15 bp, Homo sapiens
aggcagaggtggtgg

SEQ ID NO: 40827 - DNA, 15 bp, Homo sapiens
ggcagaggtggtggg

SEQ ID NO: 40828 - DNA, 15 bp, Homo sapiens
gcagaggtggtgggg

SEQ ID NO: 40829 - DNA, 15 bp, Homo sapiens
cagaggtggtggggg

SEQ ID NO: 40830 - DNA, 15 bp, Homo sapiens
agaggtggtgggggc

SEQ ID NO: 40831 - DNA, 15 bp, Homo sapiens
gaggtggtgggggca

SEQ ID NO: 40832 - DNA, 15 bp, Homo sapiens
aggtggtgggggcag

SEQ ID NO: 40833 - DNA, 15 bp, Homo sapiens
ggtggtgggggcagg

SEQ ID NO: 40834 - DNA, 15 bp, Homo sapiens
gtggtgggggcaggg

SEQ ID NO: 40835 - DNA, 15 bp, Homo sapiens
tggtgggggcaggga

SEQ ID NO: 40836 - DNA, 15 bp, Homo sapiens
ggtgggggcagggat

SEQ ID NO: 40837 - DNA, 15 bp, Homo sapiens
gtgggggcagggatg

SEQ ID NO: 40838 - DNA, 15 bp, Homo sapiens
tgggggcagggatga

SEQ ID NO: 40839 - DNA, 15 bp, Homo sapiens
gggggcagggatgat

SEQ ID NO: 40840 - DNA, 15 bp, Homo sapiens
ggggcagggatgata

SEQ ID NO: 40841 - DNA, 15 bp, Homo sapiens
gggcagggatgatag

SEQ ID NO: 40842 - DNA, 15 bp, Homo sapiens
ggcagggatgatagg

SEQ ID NO: 40843 - DNA, 15 bp, Homo sapiens
gcagggatgataggc

SEQ ID NO: 40844 - DNA, 15 bp, Homo sapiens
cagggatgataggcc

SEQ ID NO: 40845 - DNA, 15 bp, Homo sapiens
agggatgataggccc

SEQ ID NO: 40846 - DNA, 15 bp, Homo sapiens
gggatgataggccct

SEQ ID NO: 40847 - DNA, 15 bp, Homo sapiens
ggatgataggccctg

SEQ ID NO: 40848 - DNA, 15 bp, Homo sapiens
gatgataggccctgg

SEQ ID NO: 40849 - DNA, 15 bp, Homo sapiens
atgataggccctgga

SEQ ID NO: 40850 - DNA, 15 bp, Homo sapiens
tgataggccctggat

SEQ ID NO: 40851 - DNA, 15 bp, Homo sapiens
gataggccctggatg

SEQ ID NO: 40852 - DNA, 15 bp, Homo sapiens
ataggccctggatgt

SEQ ID NO: 40853 - DNA, 15 bp, Homo sapiens
taggccctggatgtg

SEQ ID NO: 40854 - DNA, 15 bp, Homo sapiens
aggccctggatgtgc

SEQ ID NO: 40855 - DNA, 15 bp, Homo sapiens
ggccctggatgtgcc

SEQ ID NO: 40856 - DNA, 15 bp, Homo sapiens
gccctggatgtgccc

SEQ ID NO: 40857 - DNA, 15 bp, Homo sapiens
ccctggatgtgccca

SEQ ID NO: 40858 - DNA, 15 bp, Homo sapiens
cctggatgtgcccac

SEQ ID NO: 40859 - DNA, 15 bp, Homo sapiens
ctggatgtgcccaca

SEQ ID NO: 40860 - DNA, 15 bp, Homo sapiens
tggatgtgcccacag

SEQ ID NO: 40861 - DNA, 15 bp, Homo sapiens
ggatgtgcccacagg

SEQ ID NO: 40862 - DNA, 15 bp, Homo sapiens
gatgtgcccacaggg

SEQ ID NO: 40863 - DNA, 15 bp, Homo sapiens
atgtgcccacaggga

SEQ ID NO: 40864 - DNA, 15 bp, Homo sapiens
tgtgcccacagggac

SEQ ID NO: 40865 - DNA, 15 bp, Homo sapiens
gtgcccacagggacc

SEQ ID NO: 40866 - DNA, 15 bp, Homo sapiens
tgcccacagggacca

SEQ ID NO: 40867 - DNA, 15 bp, Homo sapiens
gcccacagggaccaa

SEQ ID NO: 40868 - DNA, 15 bp, Homo sapiens
cccacagggaccaag

SEQ ID NO: 40869 - DNA, 15 bp, Homo sapiens
ccacagggaccaaga

SEQ ID NO: 40870 - DNA, 15 bp, Homo sapiens
cacagggaccaagaa

SEQ ID NO: 40871 - DNA, 15 bp, Homo sapiens
acagggaccaagaag

SEQ ID NO: 40872 - DNA, 15 bp, Homo sapiens
cagggaccaagaagt

SEQ ID NO: 40873 - DNA, 15 bp, Homo sapiens
agggaccaagaagtg

SEQ ID NO: 40874 - DNA, 15 bp, Homo sapiens
gggaccaagaagtga

SEQ ID NO: 40875 - DNA, 15 bp, Homo sapiens
ggaccaagaagtgag

SEQ ID NO: 40876 - DNA, 15 bp, Homo sapiens
gaccaagaagtgagg

SEQ ID NO: 40877 - DNA, 15 bp, Homo sapiens
accaagaagtgaggt

SEQ ID NO: 40878 - DNA, 15 bp, Homo sapiens
ccaagaagtgaggtt

SEQ ID NO: 40879 - DNA, 15 bp, Homo sapiens
caagaagtgaggttt

SEQ ID NO: 40880 - DNA, 15 bp, Homo sapiens
aagaagtgaggtttc

SEQ ID NO: 40881 - DNA, 15 bp, Homo sapiens
agaagtgaggtttcc

SEQ ID NO: 40882 - DNA, 15 bp, Homo sapiens
gaagtgaggtttcca

SEQ ID NO: 40883 - DNA, 15 bp, Homo sapiens
aagtgaggtttccac

SEQ ID NO: 40884 - DNA, 15 bp, Homo sapiens
agtgaggtttccact

SEQ ID NO: 40885 - DNA, 15 bp, Homo sapiens
gtgaggtttccactg

SEQ ID NO: 40886 - DNA, 15 bp, Homo sapiens
tgaggtttccactgt

SEQ ID NO: 40887 - DNA, 15 bp, Homo sapiens
gaggtttccactgtc

SEQ ID NO: 40888 - DNA, 15 bp, Homo sapiens
aggtttccactgtct

SEQ ID NO: 40889 - DNA, 15 bp, Homo sapiens
ggtttccactgtctt

SEQ ID NO: 40890 - DNA, 15 bp, Homo sapiens
gtttccactgtcttg

SEQ ID NO: 40891 - DNA, 15 bp, Homo sapiens
tttccactgtcttgc

SEQ ID NO: 40892 - DNA, 15 bp, Homo sapiens
ttccactgtcttgcc

SEQ ID NO: 40893 - DNA, 15 bp, Homo sapiens
tccactgtcttgcct

SEQ ID NO: 40894 - DNA, 15 bp, Homo sapiens
ccactgtcttgcctg

SEQ ID NO: 40895 - DNA, 15 bp, Homo sapiens
cactgtcttgcctgc

SEQ ID NO: 40896 - DNA, 15 bp, Homo sapiens
actgtcttgcctgcc

SEQ ID NO: 40897 - DNA, 15 bp, Homo sapiens
ctgtcttgcctgcca

SEQ ID NO: 40898 - DNA, 15 bp, Homo sapiens
tgtcttgcctgccag

SEQ ID NO: 40899 - DNA, 15 bp, Homo sapiens
gtcttgcctgccagg

SEQ ID NO: 40900 - DNA, 15 bp, Homo sapiens
tcttgcctgccaggg

SEQ ID NO: 40901 - DNA, 15 bp, Homo sapiens
cttgcctgccagggc

SEQ ID NO: 40902 - DNA, 15 bp, Homo sapiens
ttgcctgccagggcc

SEQ ID NO: 40903 - DNA, 15 bp, Homo sapiens
tgcctgccagggccc

SEQ ID NO: 40904 - DNA, 15 bp, Homo sapiens
gcctgccagggcccc

SEQ ID NO: 40905 - DNA, 15 bp, Homo sapiens
cctgccagggcccct

SEQ ID NO: 40906 - DNA, 15 bp, Homo sapiens
ctgccagggcccctg

SEQ ID NO: 40907 - DNA, 15 bp, Homo sapiens
tgccagggcccctgt

SEQ ID NO: 40908 - DNA, 15 bp, Homo sapiens
gccagggcccctgtt

SEQ ID NO: 40909 - DNA, 15 bp, Homo sapiens
ccagggcccctgttc

SEQ ID NO: 40910 - DNA, 15 bp, Homo sapiens
cagggcccctgttcc

SEQ ID NO: 40911 - DNA, 15 bp, Homo sapiens
agggcccctgttccc

SEQ ID NO: 40912 - DNA, 15 bp, Homo sapiens
gggcccctgttcccc

SEQ ID NO: 40913 - DNA, 15 bp, Homo sapiens
ggcccctgttccccc

SEQ ID NO: 40914 - DNA, 15 bp, Homo sapiens
gcccctgttcccccg

SEQ ID NO: 40915 - DNA, 15 bp, Homo sapiens
cccctgttcccccgc

SEQ ID NO: 40916 - DNA, 15 bp, Homo sapiens
ccctgttcccccgct

SEQ ID NO: 40917 - DNA, 15 bp, Homo sapiens
cctgttcccccgctg

SEQ ID NO: 40918 - DNA, 15 bp, Homo sapiens
ctgttcccccgctgg

SEQ ID NO: 40919 - DNA, 15 bp, Homo sapiens
tgttcccccgctggc

SEQ ID NO: 40920 - DNA, 15 bp, Homo sapiens
gttcccccgctggca

SEQ ID NO: 40921 - DNA, 15 bp, Homo sapiens
ttcccccgctggcag

SEQ ID NO: 40922 - DNA, 15 bp, Homo sapiens
tcccccgctggcagc

SEQ ID NO: 40923 - DNA, 15 bp, Homo sapiens
cccccgctggcagcc

SEQ ID NO: 40924 - DNA, 15 bp, Homo sapiens
ccccgctggcagcca

SEQ ID NO: 40925 - DNA, 15 bp, Homo sapiens
cccgctggcagccac

SEQ ID NO: 40926 - DNA, 15 bp, Homo sapiens
ccgctggcagccacc

SEQ ID NO: 40927 - DNA, 15 bp, Homo sapiens
cgctggcagccaccc

SEQ ID NO: 40928 - DNA, 15 bp, Homo sapiens
gctggcagccacccc

SEQ ID NO: 40929 - DNA, 15 bp, Homo sapiens
ctggcagccaccccc

SEQ ID NO: 40930 - DNA, 15 bp, Homo sapiens
tggcagccaccccct

SEQ ID NO: 40931 - DNA, 15 bp, Homo sapiens
ggcagccaccccctc

SEQ ID NO: 40932 - DNA, 15 bp, Homo sapiens
gcagccaccccctcc

SEQ ID NO: 40933 - DNA, 15 bp, Homo sapiens
cagccaccccctccc

SEQ ID NO: 40934 - DNA, 15 bp, Homo sapiens
agccaccccctcccc

SEQ ID NO: 40935 - DNA, 15 bp, Homo sapiens
gccaccccctccccc

SEQ ID NO: 40936 - DNA, 15 bp, Homo sapiens
ccaccccctccccca

SEQ ID NO: 40937 - DNA, 15 bp, Homo sapiens
caccccctcccccat

SEQ ID NO: 40938 - DNA, 15 bp, Homo sapiens
accccctcccccatc

SEQ ID NO: 40939 - DNA, 15 bp, Homo sapiens
ccccctcccccatca

SEQ ID NO: 40940 - DNA, 15 bp, Homo sapiens
cccctcccccatcat

SEQ ID NO: 40941 - DNA, 15 bp, Homo sapiens
ccctcccccatcata

SEQ ID NO: 40942 - DNA, 15 bp, Homo sapiens
cctcccccatcatat

SEQ ID NO: 40943 - DNA, 15 bp, Homo sapiens
ctcccccatcatatc

SEQ ID NO: 40944 - DNA, 15 bp, Homo sapiens
tcccccatcatatcc

SEQ ID NO: 40945 - DNA, 15 bp, Homo sapiens
cccccatcatatcct

SEQ ID NO: 40946 - DNA, 15 bp, Homo sapiens
ccccatcatatcctt

SEQ ID NO: 40947 - DNA, 15 bp, Homo sapiens
cccatcatatccttt

SEQ ID NO: 40948 - DNA, 15 bp, Homo sapiens
ccatcatatcctttg

SEQ ID NO: 40949 - DNA, 15 bp, Homo sapiens
catcatatcctttgc

SEQ ID NO: 40950 - DNA, 15 bp, Homo sapiens
atcatatcctttgcc

SEQ ID NO: 40951 - DNA, 15 bp, Homo sapiens
tcatatcctttgccc

SEQ ID NO: 40952 - DNA, 15 bp, Homo sapiens
catatcctttgcccc

SEQ ID NO: 40953 - DNA, 15 bp, Homo sapiens
atatcctttgcccca

SEQ ID NO: 40954 - DNA, 15 bp, Homo sapiens
tatcctttgccccaa

SEQ ID NO: 40955 - DNA, 15 bp, Homo sapiens
atcctttgccccaag

SEQ ID NO: 40956 - DNA, 15 bp, Homo sapiens
tcctttgccccaagg

SEQ ID NO: 40957 - DNA, 15 bp, Homo sapiens
cctttgccccaaggc

SEQ ID NO: 40958 - DNA, 15 bp, Homo sapiens
ctttgccccaaggct

SEQ ID NO: 40959 - DNA, 15 bp, Homo sapiens
tttgccccaaggctg

SEQ ID NO: 40960 - DNA, 15 bp, Homo sapiens
ttgccccaaggctgc

SEQ ID NO: 40961 - DNA, 15 bp, Homo sapiens
tgccccaaggctgct

SEQ ID NO: 40962 - DNA, 15 bp, Homo sapiens
gccccaaggctgctc

SEQ ID NO: 40963 - DNA, 15 bp, Homo sapiens
ccccaaggctgctca

SEQ ID NO: 40964 - DNA, 15 bp, Homo sapiens
cccaaggctgctcag

SEQ ID NO: 40965 - DNA, 15 bp, Homo sapiens
ccaaggctgctcaga

SEQ ID NO: 40966 - DNA, 15 bp, Homo sapiens
caaggctgctcagag

SEQ ID NO: 40967 - DNA, 15 bp, Homo sapiens
aaggctgctcagagg

SEQ ID NO: 40968 - DNA, 15 bp, Homo sapiens
aggctgctcagaggg

SEQ ID NO: 40969 - DNA, 15 bp, Homo sapiens
ggctgctcagagggg

SEQ ID NO: 40970 - DNA, 15 bp, Homo sapiens
gctgctcagaggggc

SEQ ID NO: 40971 - DNA, 15 bp, Homo sapiens
ctgctcagaggggcc

SEQ ID NO: 40972 - DNA, 15 bp, Homo sapiens
tgctcagaggggccc

SEQ ID NO: 40973 - DNA, 15 bp, Homo sapiens
gctcagaggggcccc

SEQ ID NO: 40974 - DNA, 15 bp, Homo sapiens
ctcagaggggccccg

SEQ ID NO: 40975 - DNA, 15 bp, Homo sapiens
tcagaggggccccgg

SEQ ID NO: 40976 - DNA, 15 bp, Homo sapiens
cagaggggccccggt

SEQ ID NO: 40977 - DNA, 15 bp, Homo sapiens
agaggggccccggtc

SEQ ID NO: 40978 - DNA, 15 bp, Homo sapiens
gaggggccccggtcc

SEQ ID NO: 40979 - DNA, 15 bp, Homo sapiens
aggggccccggtcct

SEQ ID NO: 40980 - DNA, 15 bp, Homo sapiens
ggggccccggtcctg

SEQ ID NO: 40981 - DNA, 15 bp, Homo sapiens
gggccccggtcctgg

SEQ ID NO: 40982 - DNA, 15 bp, Homo sapiens
ggccccggtcctggc

SEQ ID NO: 40983 - DNA, 15 bp, Homo sapiens
gccccggtcctggcc

SEQ ID NO: 40984 - DNA, 15 bp, Homo sapiens
ccccggtcctggccc

SEQ ID NO: 40985 - DNA, 15 bp, Homo sapiens
cccggtcctggcccc

SEQ ID NO: 40986 - DNA, 15 bp, Homo sapiens
ccggtcctggcccca

SEQ ID NO: 40987 - DNA, 15 bp, Homo sapiens
cggtcctggccccag

SEQ ID NO: 40988 - DNA, 15 bp, Homo sapiens
ggtcctggccccagc

SEQ ID NO: 40989 - DNA, 15 bp, Homo sapiens
gtcctggccccagcc

SEQ ID NO: 40990 - DNA, 15 bp, Homo sapiens
tcctggccccagccc

SEQ ID NO: 40991 - DNA, 15 bp, Homo sapiens
cctggccccagcccc

SEQ ID NO: 40992 - DNA, 15 bp, Homo sapiens
ctggccccagccccc

SEQ ID NO: 40993 - DNA, 15 bp, Homo sapiens
tggccccagccccca

SEQ ID NO: 40994 - DNA, 15 bp, Homo sapiens
ggccccagcccccac

SEQ ID NO: 40995 - DNA, 15 bp, Homo sapiens
gccccagcccccacc

SEQ ID NO: 40996 - DNA, 15 bp, Homo sapiens
ccccagcccccacct

SEQ ID NO: 40997 - DNA, 15 bp, Homo sapiens
cccagcccccacctc

SEQ ID NO: 40998 - DNA, 15 bp, Homo sapiens
ccagcccccacctcc

SEQ ID NO: 40999 - DNA, 15 bp, Homo sapiens
cagcccccacctccg

SEQ ID NO: 41000 - DNA, 15 bp, Homo sapiens
agcccccacctccgc

SEQ ID NO: 41001 - DNA, 15 bp, Homo sapiens
gcccccacctccgcc

SEQ ID NO: 41002 - DNA, 15 bp, Homo sapiens
cccccacctccgccc

SEQ ID NO: 41003 - DNA, 15 bp, Homo sapiens
ccccacctccgcccc

SEQ ID NO: 41004 - DNA, 15 bp, Homo sapiens
cccacctccgcccca

SEQ ID NO: 41005 - DNA, 15 bp, Homo sapiens
ccacctccgccccag

SEQ ID NO: 41006 - DNA, 15 bp, Homo sapiens
cacctccgccccaga

SEQ ID NO: 41007 - DNA, 15 bp, Homo sapiens
acctccgccccagac

SEQ ID NO: 41008 - DNA, 15 bp, Homo sapiens
cctccgccccagaca

SEQ ID NO: 41009 - DNA, 15 bp, Homo sapiens
ctccgccccagacac

SEQ ID NO: 41010 - DNA, 15 bp, Homo sapiens
tccgccccagacaca

SEQ ID NO: 41011 - DNA, 15 bp, Homo sapiens
ccgccccagacacac

SEQ ID NO: 41012 - DNA, 15 bp, Homo sapiens
cgccccagacacacc

SEQ ID NO: 41013 - DNA, 15 bp, Homo sapiens
gccccagacacaccc

SEQ ID NO: 41014 - DNA, 15 bp, Homo sapiens
ccccagacacacccc

SEQ ID NO: 41015 - DNA, 15 bp, Homo sapiens
cccagacacaccccc

SEQ ID NO: 41016 - DNA, 15 bp, Homo sapiens
ccagacacacccccc

SEQ ID NO: 41017 - DNA, 15 bp, Homo sapiens
cagacacacccccca

SEQ ID NO: 41018 - DNA, 15 bp, Homo sapiens
agacacaccccccag

SEQ ID NO: 41019 - DNA, 15 bp, Homo sapiens
gacacaccccccagt

SEQ ID NO: 41020 - DNA, 15 bp, Homo sapiens
acacaccccccagtc

SEQ ID NO: 41021 - DNA, 15 bp, Homo sapiens
cacaccccccagtcg

SEQ ID NO: 41022 - DNA, 15 bp, Homo sapiens
acaccccccagtcga

SEQ ID NO: 41023 - DNA, 15 bp, Homo sapiens
caccccccagtcgag

SEQ ID NO: 41024 - DNA, 15 bp, Homo sapiens
accccccagtcgagc

SEQ ID NO: 41025 - DNA, 15 bp, Homo sapiens
ccccccagtcgagcc

SEQ ID NO: 41026 - DNA, 15 bp, Homo sapiens
cccccagtcgagccc

SEQ ID NO: 41027 - DNA, 15 bp, Homo sapiens
ccccagtcgagccct

SEQ ID NO: 41028 - DNA, 15 bp, Homo sapiens
cccagtcgagccctg

SEQ ID NO: 41029 - DNA, 15 bp, Homo sapiens
ccagtcgagccctgc

SEQ ID NO: 41030 - DNA, 15 bp, Homo sapiens
cagtcgagccctgca

SEQ ID NO: 41031 - DNA, 15 bp, Homo sapiens
agtcgagccctgcag

SEQ ID NO: 41032 - DNA, 15 bp, Homo sapiens
gtcgagccctgcagc

SEQ ID NO: 41033 - DNA, 15 bp, Homo sapiens
tcgagccctgcagcc

SEQ ID NO: 41034 - DNA, 15 bp, Homo sapiens
cgagccctgcagcca

SEQ ID NO: 41035 - DNA, 15 bp, Homo sapiens
gagccctgcagccaa

SEQ ID NO: 41036 - DNA, 15 bp, Homo sapiens
agccctgcagccaaa

SEQ ID NO: 41037 - DNA, 15 bp, Homo sapiens
gccctgcagccaaac

SEQ ID NO: 41038 - DNA, 15 bp, Homo sapiens
ccctgcagccaaaca

SEQ ID NO: 41039 - DNA, 15 bp, Homo sapiens
cctgcagccaaacag

SEQ ID NO: 41040 - DNA, 15 bp, Homo sapiens
ctgcagccaaacaga

SEQ ID NO: 41041 - DNA, 15 bp, Homo sapiens
tgcagccaaacagag

SEQ ID NO: 41042 - DNA, 15 bp, Homo sapiens
gcagccaaacagagc

SEQ ID NO: 41043 - DNA, 15 bp, Homo sapiens
cagccaaacagagcc

SEQ ID NO: 41044 - DNA, 15 bp, Homo sapiens
agccaaacagagcct

SEQ ID NO: 41045 - DNA, 15 bp, Homo sapiens
gccaaacagagcctt

SEQ ID NO: 41046 - DNA, 15 bp, Homo sapiens
ccaaacagagccttc

SEQ ID NO: 41047 - DNA, 15 bp, Homo sapiens
caaacagagccttca

SEQ ID NO: 41048 - DNA, 15 bp, Homo sapiens
aaacagagccttcac

SEQ ID NO: 41049 - DNA, 15 bp, Homo sapiens
aacagagccttcaca

SEQ ID NO: 41050 - DNA, 15 bp, Homo sapiens
acagagccttcacaa

SEQ ID NO: 41051 - DNA, 15 bp, Homo sapiens
cagagccttcacaac

SEQ ID NO: 41052 - DNA, 15 bp, Homo sapiens
agagccttcacaacc

SEQ ID NO: 41053 - DNA, 15 bp, Homo sapiens
gagccttcacaacca

SEQ ID NO: 41054 - DNA, 15 bp, Homo sapiens
agccttcacaaccag

SEQ ID NO: 41055 - DNA, 15 bp, Homo sapiens
gccttcacaaccagc

SEQ ID NO: 41056 - DNA, 15 bp, Homo sapiens
ccttcacaaccagcc

SEQ ID NO: 41057 - DNA, 15 bp, Homo sapiens
cttcacaaccagcca

SEQ ID NO: 41058 - DNA, 15 bp, Homo sapiens
ttcacaaccagccac

SEQ ID NO: 41059 - DNA, 15 bp, Homo sapiens
tcacaaccagccaca

SEQ ID NO: 41060 - DNA, 15 bp, Homo sapiens
cacaaccagccacac

SEQ ID NO: 41061 - DNA, 15 bp, Homo sapiens
acaaccagccacaca

SEQ ID NO: 41062 - DNA, 15 bp, Homo sapiens
caaccagccacacag

SEQ ID NO: 41063 - DNA, 15 bp, Homo sapiens
aaccagccacacaga

SEQ ID NO: 41064 - DNA, 15 bp, Homo sapiens
accagccacacagag

SEQ ID NO: 41065 - DNA, 15 bp, Homo sapiens
ccagccacacagagc

SEQ ID NO: 41066 - DNA, 15 bp, Homo sapiens
cagccacacagagcc

SEQ ID NO: 41067 - DNA, 15 bp, Homo sapiens
agccacacagagcct

SEQ ID NO: 41068 - DNA, 15 bp, Homo sapiens
gccacacagagcctg

SEQ ID NO: 41069 - DNA, 15 bp, Homo sapiens
ccacacagagcctgc

SEQ ID NO: 41070 - DNA, 15 bp, Homo sapiens
cacacagagcctgcc

SEQ ID NO: 41071 - DNA, 15 bp, Homo sapiens
acacagagcctgcct

SEQ ID NO: 41072 - DNA, 15 bp, Homo sapiens
cacagagcctgcctc

SEQ ID NO: 41073 - DNA, 15 bp, Homo sapiens
acagagcctgcctca

SEQ ID NO: 41074 - DNA, 15 bp, Homo sapiens
cagagcctgcctcag

SEQ ID NO: 41075 - DNA, 15 bp, Homo sapiens
agagcctgcctcagc

SEQ ID NO: 41076 - DNA, 15 bp, Homo sapiens
gagcctgcctcagct

SEQ ID NO: 41077 - DNA, 15 bp, Homo sapiens
agcctgcctcagctg

SEQ ID NO: 41078 - DNA, 15 bp, Homo sapiens
gcctgcctcagctgc

SEQ ID NO: 41079 - DNA, 15 bp, Homo sapiens
cctgcctcagctgct

SEQ ID NO: 41080 - DNA, 15 bp, Homo sapiens
ctgcctcagctgctc

SEQ ID NO: 41081 - DNA, 15 bp, Homo sapiens
tgcctcagctgctcg

SEQ ID NO: 41082 - DNA, 15 bp, Homo sapiens
gcctcagctgctcgc

SEQ ID NO: 41083 - DNA, 15 bp, Homo sapiens
cctcagctgctcgca

SEQ ID NO: 41084 - DNA, 15 bp, Homo sapiens
ctcagctgctcgcac

SEQ ID NO: 41085 - DNA, 15 bp, Homo sapiens
tcagctgctcgcaca

SEQ ID NO: 41086 - DNA, 15 bp, Homo sapiens
cagctgctcgcacag

SEQ ID NO: 41087 - DNA, 15 bp, Homo sapiens
agctgctcgcacaga

SEQ ID NO: 41088 - DNA, 15 bp, Homo sapiens
gctgctcgcacagat

SEQ ID NO: 41089 - DNA, 15 bp, Homo sapiens
ctgctcgcacagatt

SEQ ID NO: 41090 - DNA, 15 bp, Homo sapiens
tgctcgcacagatta

SEQ ID NO: 41091 - DNA, 15 bp, Homo sapiens
gctcgcacagattac

SEQ ID NO: 41092 - DNA, 15 bp, Homo sapiens
ctcgcacagattact

SEQ ID NO: 41093 - DNA, 15 bp, Homo sapiens
tcgcacagattactt

SEQ ID NO: 41094 - DNA, 15 bp, Homo sapiens
cgcacagattacttc

SEQ ID NO: 41095 - DNA, 15 bp, Homo sapiens
gcacagattacttca

SEQ ID NO: 41096 - DNA, 15 bp, Homo sapiens
cacagattacttcag

SEQ ID NO: 41097 - DNA, 15 bp, Homo sapiens
acagattacttcagg

SEQ ID NO: 41098 - DNA, 15 bp, Homo sapiens
cagattacttcaggg

SEQ ID NO: 41099 - DNA, 15 bp, Homo sapiens
agattacttcagggc

SEQ ID NO: 41100 - DNA, 15 bp, Homo sapiens
gattacttcagggct

SEQ ID NO: 41101 - DNA, 15 bp, Homo sapiens
attacttcagggctg

SEQ ID NO: 41102 - DNA, 15 bp, Homo sapiens
ttacttcagggctgg

SEQ ID NO: 41103 - DNA, 15 bp, Homo sapiens
tacttcagggctgga

SEQ ID NO: 41104 - DNA, 15 bp, Homo sapiens
acttcagggctggaa

SEQ ID NO: 41105 - DNA, 15 bp, Homo sapiens
cttcagggctggaaa

SEQ ID NO: 41106 - DNA, 15 bp, Homo sapiens
ttcagggctggaaaa

SEQ ID NO: 41107 - DNA, 15 bp, Homo sapiens
tcagggctggaaaag

SEQ ID NO: 41108 - DNA, 15 bp, Homo sapiens
cagggctggaaaagt

SEQ ID NO: 41109 - DNA, 15 bp, Homo sapiens
agggctggaaaagtc

SEQ ID NO: 41110 - DNA, 15 bp, Homo sapiens
gggctggaaaagtca

SEQ ID NO: 41111 - DNA, 15 bp, Homo sapiens
ggctggaaaagtcac

SEQ ID NO: 41112 - DNA, 15 bp, Homo sapiens
gctggaaaagtcaca

SEQ ID NO: 41113 - DNA, 15 bp, Homo sapiens
ctggaaaagtcacac

SEQ ID NO: 41114 - DNA, 15 bp, Homo sapiens
tggaaaagtcacaca

SEQ ID NO: 41115 - DNA, 15 bp, Homo sapiens
ggaaaagtcacacag

SEQ ID NO: 41116 - DNA, 15 bp, Homo sapiens
gaaaagtcacacaga

SEQ ID NO: 41117 - DNA, 15 bp, Homo sapiens
aaaagtcacacagac

SEQ ID NO: 41118 - DNA, 15 bp, Homo sapiens
aaagtcacacagaca

SEQ ID NO: 41119 - DNA, 15 bp, Homo sapiens
aagtcacacagacac

SEQ ID NO: 41120 - DNA, 15 bp, Homo sapiens
agtcacacagacaca

SEQ ID NO: 41121 - DNA, 15 bp, Homo sapiens
gtcacacagacacac

SEQ ID NO: 41122 - DNA, 15 bp, Homo sapiens
tcacacagacacaca

SEQ ID NO: 41123 - DNA, 15 bp, Homo sapiens
cacacagacacacaa

SEQ ID NO: 41124 - DNA, 15 bp, Homo sapiens
acacagacacacaaa

SEQ ID NO: 41125 - DNA, 15 bp, Homo sapiens
cacagacacacaaaa

SEQ ID NO: 41126 - DNA, 15 bp, Homo sapiens
acagacacacaaaat

SEQ ID NO: 41127 - DNA, 15 bp, Homo sapiens
cagacacacaaaatg

SEQ ID NO: 41128 - DNA, 15 bp, Homo sapiens
agacacacaaaatgt

SEQ ID NO: 41129 - DNA, 15 bp, Homo sapiens
gacacacaaaatgtc

SEQ ID NO: 41130 - DNA, 15 bp, Homo sapiens
acacacaaaatgtca

SEQ ID NO: 41131 - DNA, 15 bp, Homo sapiens
cacacaaaatgtcac

SEQ ID NO: 41132 - DNA, 15 bp, Homo sapiens
acacaaaatgtcaca

SEQ ID NO: 41133 - DNA, 15 bp, Homo sapiens
cacaaaatgtcacaa

SEQ ID NO: 41134 - DNA, 15 bp, Homo sapiens
acaaaatgtcacaat

SEQ ID NO: 41135 - DNA, 15 bp, Homo sapiens
caaaatgtcacaatc

SEQ ID NO: 41136 - DNA, 15 bp, Homo sapiens
aaaatgtcacaatcc

SEQ ID NO: 41137 - DNA, 15 bp, Homo sapiens
aaatgtcacaatcct

SEQ ID NO: 41138 - DNA, 15 bp, Homo sapiens
aatgtcacaatcctg

SEQ ID NO: 41139 - DNA, 15 bp, Homo sapiens
atgtcacaatcctgt

SEQ ID NO: 41140 - DNA, 15 bp, Homo sapiens
tgtcacaatcctgtc

SEQ ID NO: 41141 - DNA, 15 bp, Homo sapiens
gtcacaatcctgtcc

SEQ ID NO: 41142 - DNA, 15 bp, Homo sapiens
tcacaatcctgtccc

SEQ ID NO: 41143 - DNA, 15 bp, Homo sapiens
cacaatcctgtccct

SEQ ID NO: 41144 - DNA, 15 bp, Homo sapiens
acaatcctgtccctc

SEQ ID NO: 41145 - DNA, 15 bp, Homo sapiens
caatcctgtccctca

SEQ ID NO: 41146 - DNA, 15 bp, Homo sapiens
aatcctgtccctcac

SEQ ID NO: 41147 - DNA, 15 bp, Homo sapiens
atcctgtccctcact

SEQ ID NO: 41148 - DNA, 15 bp, Homo sapiens
tcctgtccctcactc

SEQ ID NO: 41149 - DNA, 15 bp, Homo sapiens
cctgtccctcactca

SEQ ID NO: 41150 - DNA, 15 bp, Homo sapiens
ctgtccctcactcaa

SEQ ID NO: 41151 - DNA, 15 bp, Homo sapiens
tgtccctcactcaac

SEQ ID NO: 41152 - DNA, 15 bp, Homo sapiens
gtccctcactcaaca

SEQ ID NO: 41153 - DNA, 15 bp, Homo sapiens
tccctcactcaacac

SEQ ID NO: 41154 - DNA, 15 bp, Homo sapiens
ccctcactcaacaca

SEQ ID NO: 41155 - DNA, 15 bp, Homo sapiens
cctcactcaacacaa

SEQ ID NO: 41156 - DNA, 15 bp, Homo sapiens
ctcactcaacacaaa

SEQ ID NO: 41157 - DNA, 15 bp, Homo sapiens
tcactcaacacaaac

SEQ ID NO: 41158 - DNA, 15 bp, Homo sapiens
cactcaacacaaacc

SEQ ID NO: 41159 - DNA, 15 bp, Homo sapiens
actcaacacaaaccc

SEQ ID NO: 41160 - DNA, 15 bp, Homo sapiens
ctcaacacaaacccc

SEQ ID NO: 41161 - DNA, 15 bp, Homo sapiens
tcaacacaaacccca

SEQ ID NO: 41162 - DNA, 15 bp, Homo sapiens
caacacaaaccccaa

SEQ ID NO: 41163 - DNA, 15 bp, Homo sapiens
aacacaaaccccaaa

SEQ ID NO: 41164 - DNA, 15 bp, Homo sapiens
acacaaaccccaaaa

SEQ ID NO: 41165 - DNA, 15 bp, Homo sapiens
cacaaaccccaaaac

SEQ ID NO: 41166 - DNA, 15 bp, Homo sapiens
acaaaccccaaaaca

SEQ ID NO: 41167 - DNA, 15 bp, Homo sapiens
caaaccccaaaacac

SEQ ID NO: 41168 - DNA, 15 bp, Homo sapiens
aaaccccaaaacaca

SEQ ID NO: 41169 - DNA, 15 bp, Homo sapiens
aaccccaaaacacag

SEQ ID NO: 41170 - DNA, 15 bp, Homo sapiens
accccaaaacacaga

SEQ ID NO: 41171 - DNA, 15 bp, Homo sapiens
ccccaaaacacagag

SEQ ID NO: 41172 - DNA, 15 bp, Homo sapiens
cccaaaacacagaga

SEQ ID NO: 41173 - DNA, 15 bp, Homo sapiens
ccaaaacacagagag

SEQ ID NO: 41174 - DNA, 15 bp, Homo sapiens
caaaacacagagagc

SEQ ID NO: 41175 - DNA, 15 bp, Homo sapiens
aaaacacagagagcc

SEQ ID NO: 41176 - DNA, 15 bp, Homo sapiens
aaacacagagagcct

SEQ ID NO: 41177 - DNA, 15 bp, Homo sapiens
aacacagagagcctg

SEQ ID NO: 41178 - DNA, 15 bp, Homo sapiens
acacagagagcctgc

SEQ ID NO: 41179 - DNA, 15 bp, Homo sapiens
cacagagagcctgcc

SEQ ID NO: 41180 - DNA, 15 bp, Homo sapiens
acagagagcctgcct

SEQ ID NO: 41181 - DNA, 15 bp, Homo sapiens
cagagagcctgcctc

SEQ ID NO: 41182 - DNA, 15 bp, Homo sapiens
agagagcctgcctca

SEQ ID NO: 41183 - DNA, 15 bp, Homo sapiens
gagagcctgcctcag

SEQ ID NO: 41184 - DNA, 15 bp, Homo sapiens
agagcctgcctcagt

SEQ ID NO: 41185 - DNA, 15 bp, Homo sapiens
gagcctgcctcagta

SEQ ID NO: 41186 - DNA, 15 bp, Homo sapiens
agcctgcctcagtac

SEQ ID NO: 41187 - DNA, 15 bp, Homo sapiens
gcctgcctcagtaca

SEQ ID NO: 41188 - DNA, 15 bp, Homo sapiens
cctgcctcagtacac

SEQ ID NO: 41189 - DNA, 15 bp, Homo sapiens
ctgcctcagtacact

SEQ ID NO: 41190 - DNA, 15 bp, Homo sapiens
tgcctcagtacactc

SEQ ID NO: 41191 - DNA, 15 bp, Homo sapiens
gcctcagtacactca

SEQ ID NO: 41192 - DNA, 15 bp, Homo sapiens
cctcagtacactcaa

SEQ ID NO: 41193 - DNA, 15 bp, Homo sapiens
ctcagtacactcaaa

SEQ ID NO: 41194 - DNA, 15 bp, Homo sapiens
tcagtacactcaaac

SEQ ID NO: 41195 - DNA, 15 bp, Homo sapiens
cagtacactcaaaca

SEQ ID NO: 41196 - DNA, 15 bp, Homo sapiens
agtacactcaaacaa

SEQ ID NO: 41197 - DNA, 15 bp, Homo sapiens
gtacactcaaacaac

SEQ ID NO: 41198 - DNA, 15 bp, Homo sapiens
tacactcaaacaacc

SEQ ID NO: 41199 - DNA, 15 bp, Homo sapiens
acactcaaacaacct

SEQ ID NO: 41200 - DNA, 15 bp, Homo sapiens
cactcaaacaacctc

SEQ ID NO: 41201 - DNA, 15 bp, Homo sapiens
actcaaacaacctca

SEQ ID NO: 41202 - DNA, 15 bp, Homo sapiens
ctcaaacaacctcaa

SEQ ID NO: 41203 - DNA, 15 bp, Homo sapiens
tcaaacaacctcaaa

SEQ ID NO: 41204 - DNA, 15 bp, Homo sapiens
caaacaacctcaaag

SEQ ID NO: 41205 - DNA, 15 bp, Homo sapiens
aaacaacctcaaagc

SEQ ID NO: 41206 - DNA, 15 bp, Homo sapiens
aacaacctcaaagct

SEQ ID NO: 41207 - DNA, 15 bp, Homo sapiens
acaacctcaaagctg

SEQ ID NO: 41208 - DNA, 15 bp, Homo sapiens
caacctcaaagctgc

SEQ ID NO: 41209 - DNA, 15 bp, Homo sapiens
aacctcaaagctgca

SEQ ID NO: 41210 - DNA, 15 bp, Homo sapiens
acctcaaagctgcat

SEQ ID NO: 41211 - DNA, 15 bp, Homo sapiens
cctcaaagctgcatc

SEQ ID NO: 41212 - DNA, 15 bp, Homo sapiens
ctcaaagctgcatca

SEQ ID NO: 41213 - DNA, 15 bp, Homo sapiens
tcaaagctgcatcat

SEQ ID NO: 41214 - DNA, 15 bp, Homo sapiens
caaagctgcatcatc

SEQ ID NO: 41215 - DNA, 15 bp, Homo sapiens
aaagctgcatcatca

SEQ ID NO: 41216 - DNA, 15 bp, Homo sapiens
aagctgcatcatcac

SEQ ID NO: 41217 - DNA, 15 bp, Homo sapiens
agctgcatcatcaca

SEQ ID NO: 41218 - DNA, 15 bp, Homo sapiens
gctgcatcatcacac

SEQ ID NO: 41219 - DNA, 15 bp, Homo sapiens
ctgcatcatcacaca

SEQ ID NO: 41220 - DNA, 15 bp, Homo sapiens
tgcatcatcacacaa

SEQ ID NO: 41221 - DNA, 15 bp, Homo sapiens
gcatcatcacacaat

SEQ ID NO: 41222 - DNA, 15 bp, Homo sapiens
catcatcacacaatc

SEQ ID NO: 41223 - DNA, 15 bp, Homo sapiens
atcatcacacaatca

SEQ ID NO: 41224 - DNA, 15 bp, Homo sapiens
tcatcacacaatcac

SEQ ID NO: 41225 - DNA, 15 bp, Homo sapiens
catcacacaatcaca

SEQ ID NO: 41226 - DNA, 15 bp, Homo sapiens
atcacacaatcacac

SEQ ID NO: 41227 - DNA, 15 bp, Homo sapiens
tcacacaatcacaca

SEQ ID NO: 41228 - DNA, 15 bp, Homo sapiens
cacacaatcacacac

SEQ ID NO: 41229 - DNA, 15 bp, Homo sapiens
acacaatcacacaca

SEQ ID NO: 41230 - DNA, 15 bp, Homo sapiens
cacaatcacacacaa

SEQ ID NO: 41231 - DNA, 15 bp, Homo sapiens
acaatcacacacaag

SEQ ID NO: 41232 - DNA, 15 bp, Homo sapiens
caatcacacacaagc

SEQ ID NO: 41233 - DNA, 15 bp, Homo sapiens
aatcacacacaagca

SEQ ID NO: 41234 - DNA, 15 bp, Homo sapiens
atcacacacaagcac

SEQ ID NO: 41235 - DNA, 15 bp, Homo sapiens
tcacacacaagcaca

SEQ ID NO: 41236 - DNA, 15 bp, Homo sapiens
cacacacaagcacag

SEQ ID NO: 41237 - DNA, 15 bp, Homo sapiens
acacacaagcacagc

SEQ ID NO: 41238 - DNA, 15 bp, Homo sapiens
cacacaagcacagcc

SEQ ID NO: 41239 - DNA, 15 bp, Homo sapiens
acacaagcacagccc

SEQ ID NO: 41240 - DNA, 15 bp, Homo sapiens
cacaagcacagccct

SEQ ID NO: 41241 - DNA, 15 bp, Homo sapiens
acaagcacagccctg

SEQ ID NO: 41242 - DNA, 15 bp, Homo sapiens
caagcacagccctga

SEQ ID NO: 41243 - DNA, 15 bp, Homo sapiens
aagcacagccctgac

SEQ ID NO: 41244 - DNA, 15 bp, Homo sapiens
agcacagccctgaca

SEQ ID NO: 41245 - DNA, 15 bp, Homo sapiens
gcacagccctgacaa

SEQ ID NO: 41246 - DNA, 15 bp, Homo sapiens
cacagccctgacaac

SEQ ID NO: 41247 - DNA, 15 bp, Homo sapiens
acagccctgacaacc

SEQ ID NO: 41248 - DNA, 15 bp, Homo sapiens
cagccctgacaaccc

SEQ ID NO: 41249 - DNA, 15 bp, Homo sapiens
agccctgacaaccca

SEQ ID NO: 41250 - DNA, 15 bp, Homo sapiens
gccctgacaacccac

SEQ ID NO: 41251 - DNA, 15 bp, Homo sapiens
ccctgacaacccaca

SEQ ID NO: 41252 - DNA, 15 bp, Homo sapiens
cctgacaacccacac

SEQ ID NO: 41253 - DNA, 15 bp, Homo sapiens
ctgacaacccacaca

SEQ ID NO: 41254 - DNA, 15 bp, Homo sapiens
tgacaacccacacac

SEQ ID NO: 41255 - DNA, 15 bp, Homo sapiens
gacaacccacacacc

SEQ ID NO: 41256 - DNA, 15 bp, Homo sapiens
acaacccacacaccc

SEQ ID NO: 41257 - DNA, 15 bp, Homo sapiens
caacccacacacccc

SEQ ID NO: 41258 - DNA, 15 bp, Homo sapiens
aacccacacacccca

SEQ ID NO: 41259 - DNA, 15 bp, Homo sapiens
acccacacaccccaa

SEQ ID NO: 41260 - DNA, 15 bp, Homo sapiens
cccacacaccccaag

SEQ ID NO: 41261 - DNA, 15 bp, Homo sapiens
ccacacaccccaagg

SEQ ID NO: 41262 - DNA, 15 bp, Homo sapiens
cacacaccccaaggc

SEQ ID NO: 41263 - DNA, 15 bp, Homo sapiens
acacaccccaaggca

SEQ ID NO: 41264 - DNA, 15 bp, Homo sapiens
cacaccccaaggcac

SEQ ID NO: 41265 - DNA, 15 bp, Homo sapiens
acaccccaaggcacg

SEQ ID NO: 41266 - DNA, 15 bp, Homo sapiens
caccccaaggcacgc

SEQ ID NO: 41267 - DNA, 15 bp, Homo sapiens
accccaaggcacgca

SEQ ID NO: 41268 - DNA, 15 bp, Homo sapiens
ccccaaggcacgcac

SEQ ID NO: 41269 - DNA, 15 bp, Homo sapiens
cccaaggcacgcacc

SEQ ID NO: 41270 - DNA, 15 bp, Homo sapiens
ccaaggcacgcaccc

SEQ ID NO: 41271 - DNA, 15 bp, Homo sapiens
caaggcacgcaccca

SEQ ID NO: 41272 - DNA, 15 bp, Homo sapiens
aaggcacgcacccac

SEQ ID NO: 41273 - DNA, 15 bp, Homo sapiens
aggcacgcacccaca

SEQ ID NO: 41274 - DNA, 15 bp, Homo sapiens
ggcacgcacccacag

SEQ ID NO: 41275 - DNA, 15 bp, Homo sapiens
gcacgcacccacagc

SEQ ID NO: 41276 - DNA, 15 bp, Homo sapiens
cacgcacccacagcc

SEQ ID NO: 41277 - DNA, 15 bp, Homo sapiens
acgcacccacagcca

SEQ ID NO: 41278 - DNA, 15 bp, Homo sapiens
cgcacccacagccag

SEQ ID NO: 41279 - DNA, 15 bp, Homo sapiens
gcacccacagccagc

SEQ ID NO: 41280 - DNA, 15 bp, Homo sapiens
cacccacagccagcc

SEQ ID NO: 41281 - DNA, 15 bp, Homo sapiens
acccacagccagcct

SEQ ID NO: 41282 - DNA, 15 bp, Homo sapiens
cccacagccagcctc

SEQ ID NO: 41283 - DNA, 15 bp, Homo sapiens
ccacagccagcctca

SEQ ID NO: 41284 - DNA, 15 bp, Homo sapiens
cacagccagcctcag

SEQ ID NO: 41285 - DNA, 15 bp, Homo sapiens
acagccagcctcagg

SEQ ID NO: 41286 - DNA, 15 bp, Homo sapiens
cagccagcctcaggg

SEQ ID NO: 41287 - DNA, 15 bp, Homo sapiens
agccagcctcagggc

SEQ ID NO: 41288 - DNA, 15 bp, Homo sapiens
gccagcctcagggcc

SEQ ID NO: 41289 - DNA, 15 bp, Homo sapiens
ccagcctcagggccc

SEQ ID NO: 41290 - DNA, 15 bp, Homo sapiens
cagcctcagggccca

SEQ ID NO: 41291 - DNA, 15 bp, Homo sapiens
agcctcagggcccac

SEQ ID NO: 41292 - DNA, 15 bp, Homo sapiens
gcctcagggcccaca

SEQ ID NO: 41293 - DNA, 15 bp, Homo sapiens
cctcagggcccacag

SEQ ID NO: 41294 - DNA, 15 bp, Homo sapiens
ctcagggcccacagg

SEQ ID NO: 41295 - DNA, 15 bp, Homo sapiens
tcagggcccacaggg

SEQ ID NO: 41296 - DNA, 15 bp, Homo sapiens
cagggcccacagggg

SEQ ID NO: 41297 - DNA, 15 bp, Homo sapiens
agggcccacaggggc

SEQ ID NO: 41298 - DNA, 15 bp, Homo sapiens
gggcccacaggggca

SEQ ID NO: 41299 - DNA, 15 bp, Homo sapiens
ggcccacaggggcac

SEQ ID NO: 41300 - DNA, 15 bp, Homo sapiens
gcccacaggggcact

SEQ ID NO: 41301 - DNA, 15 bp, Homo sapiens
cccacaggggcactg

SEQ ID NO: 41302 - DNA, 15 bp, Homo sapiens
ccacaggggcactgt

SEQ ID NO: 41303 - DNA, 15 bp, Homo sapiens
cacaggggcactgtc

SEQ ID NO: 41304 - DNA, 15 bp, Homo sapiens
acaggggcactgtca

SEQ ID NO: 41305 - DNA, 15 bp, Homo sapiens
caggggcactgtcaa

SEQ ID NO: 41306 - DNA, 15 bp, Homo sapiens
aggggcactgtcaac

SEQ ID NO: 41307 - DNA, 15 bp, Homo sapiens
ggggcactgtcaaca

SEQ ID NO: 41308 - DNA, 15 bp, Homo sapiens
gggcactgtcaacac

SEQ ID NO: 41309 - DNA, 15 bp, Homo sapiens
ggcactgtcaacaca

SEQ ID NO: 41310 - DNA, 15 bp, Homo sapiens
gcactgtcaacacag

SEQ ID NO: 41311 - DNA, 15 bp, Homo sapiens
cactgtcaacacagg

SEQ ID NO: 41312 - DNA, 15 bp, Homo sapiens
actgtcaacacaggg

SEQ ID NO: 41313 - DNA, 15 bp, Homo sapiens
ctgtcaacacagggg

SEQ ID NO: 41314 - DNA, 15 bp, Homo sapiens
tgtcaacacaggggt

SEQ ID NO: 41315 - DNA, 15 bp, Homo sapiens
gtcaacacaggggtg

SEQ ID NO: 41316 - DNA, 15 bp, Homo sapiens
tcaacacaggggtgt

SEQ ID NO: 41317 - DNA, 15 bp, Homo sapiens
caacacaggggtgtg

SEQ ID NO: 41318 - DNA, 15 bp, Homo sapiens
aacacaggggtgtgc

SEQ ID NO: 41319 - DNA, 15 bp, Homo sapiens
acacaggggtgtgcc

SEQ ID NO: 41320 - DNA, 15 bp, Homo sapiens
cacaggggtgtgccc

SEQ ID NO: 41321 - DNA, 15 bp, Homo sapiens
acaggggtgtgccca

SEQ ID NO: 41322 - DNA, 15 bp, Homo sapiens
caggggtgtgcccag

SEQ ID NO: 41323 - DNA, 15 bp, Homo sapiens
aggggtgtgcccaga

SEQ ID NO: 41324 - DNA, 15 bp, Homo sapiens
ggggtgtgcccagag

SEQ ID NO: 41325 - DNA, 15 bp, Homo sapiens
gggtgtgcccagagg

SEQ ID NO: 41326 - DNA, 15 bp, Homo sapiens
ggtgtgcccagaggc

SEQ ID NO: 41327 - DNA, 15 bp, Homo sapiens
gtgtgcccagaggcc

SEQ ID NO: 41328 - DNA, 15 bp, Homo sapiens
tgtgcccagaggcct

SEQ ID NO: 41329 - DNA, 15 bp, Homo sapiens
gtgcccagaggccta

SEQ ID NO: 41330 - DNA, 15 bp, Homo sapiens
tgcccagaggcctac

SEQ ID NO: 41331 - DNA, 15 bp, Homo sapiens
gcccagaggcctaca

SEQ ID NO: 41332 - DNA, 15 bp, Homo sapiens
cccagaggcctacac

SEQ ID NO: 41333 - DNA, 15 bp, Homo sapiens
ccagaggcctacaca

SEQ ID NO: 41334 - DNA, 15 bp, Homo sapiens
cagaggcctacacag

SEQ ID NO: 41335 - DNA, 15 bp, Homo sapiens
agaggcctacacaga

SEQ ID NO: 41336 - DNA, 15 bp, Homo sapiens
gaggcctacacagaa

SEQ ID NO: 41337 - DNA, 15 bp, Homo sapiens
aggcctacacagaag

SEQ ID NO: 41338 - DNA, 15 bp, Homo sapiens
ggcctacacagaagc

SEQ ID NO: 41339 - DNA, 15 bp, Homo sapiens
gcctacacagaagca

SEQ ID NO: 41340 - DNA, 15 bp, Homo sapiens
cctacacagaagcag

SEQ ID NO: 41341 - DNA, 15 bp, Homo sapiens
ctacacagaagcagc

SEQ ID NO: 41342 - DNA, 15 bp, Homo sapiens
tacacagaagcagcg

SEQ ID NO: 41343 - DNA, 15 bp, Homo sapiens
acacagaagcagcgt

SEQ ID NO: 41344 - DNA, 15 bp, Homo sapiens
cacagaagcagcgtc

SEQ ID NO: 41345 - DNA, 15 bp, Homo sapiens
acagaagcagcgtca

SEQ ID NO: 41346 - DNA, 15 bp, Homo sapiens
cagaagcagcgtcag

SEQ ID NO: 41347 - DNA, 15 bp, Homo sapiens
agaagcagcgtcagt

SEQ ID NO: 41348 - DNA, 15 bp, Homo sapiens
gaagcagcgtcagta

SEQ ID NO: 41349 - DNA, 15 bp, Homo sapiens
aagcagcgtcagtac

SEQ ID NO: 41350 - DNA, 15 bp, Homo sapiens
agcagcgtcagtacc

SEQ ID NO: 41351 - DNA, 15 bp, Homo sapiens
gcagcgtcagtaccc

SEQ ID NO: 41352 - DNA, 15 bp, Homo sapiens
cagcgtcagtaccct

SEQ ID NO: 41353 - DNA, 15 bp, Homo sapiens
agcgtcagtaccctc

SEQ ID NO: 41354 - DNA, 15 bp, Homo sapiens
gcgtcagtaccctca

SEQ ID NO: 41355 - DNA, 15 bp, Homo sapiens
cgtcagtaccctcag

SEQ ID NO: 41356 - DNA, 15 bp, Homo sapiens
gtcagtaccctcagg

SEQ ID NO: 41357 - DNA, 15 bp, Homo sapiens
tcagtaccctcagga

SEQ ID NO: 41358 - DNA, 15 bp, Homo sapiens
cagtaccctcaggat

SEQ ID NO: 41359 - DNA, 15 bp, Homo sapiens
agtaccctcaggatc

SEQ ID NO: 41360 - DNA, 15 bp, Homo sapiens
gtaccctcaggatct

SEQ ID NO: 41361 - DNA, 15 bp, Homo sapiens
taccctcaggatctg

SEQ ID NO: 41362 - DNA, 15 bp, Homo sapiens
accctcaggatctga

SEQ ID NO: 41363 - DNA, 15 bp, Homo sapiens
ccctcaggatctgag

SEQ ID NO: 41364 - DNA, 15 bp, Homo sapiens
cctcaggatctgagg

SEQ ID NO: 41365 - DNA, 15 bp, Homo sapiens
ctcaggatctgaggt

SEQ ID NO: 41366 - DNA, 15 bp, Homo sapiens
tcaggatctgaggtc

SEQ ID NO: 41367 - DNA, 15 bp, Homo sapiens
caggatctgaggtcc

SEQ ID NO: 41368 - DNA, 15 bp, Homo sapiens
aggatctgaggtccc

SEQ ID NO: 41369 - DNA, 15 bp, Homo sapiens
ggatctgaggtccca

SEQ ID NO: 41370 - DNA, 15 bp, Homo sapiens
gatctgaggtcccaa

SEQ ID NO: 41371 - DNA, 15 bp, Homo sapiens
atctgaggtcccaac

SEQ ID NO: 41372 - DNA, 15 bp, Homo sapiens
tctgaggtcccaaca

SEQ ID NO: 41373 - DNA, 15 bp, Homo sapiens
ctgaggtcccaacac

SEQ ID NO: 41374 - DNA, 15 bp, Homo sapiens
tgaggtcccaacacg

SEQ ID NO: 41375 - DNA, 15 bp, Homo sapiens
gaggtcccaacacgt

SEQ ID NO: 41376 - DNA, 15 bp, Homo sapiens
aggtcccaacacgtg

SEQ ID NO: 41377 - DNA, 15 bp, Homo sapiens
ggtcccaacacgtgc

SEQ ID NO: 41378 - DNA, 15 bp, Homo sapiens
gtcccaacacgtgct

SEQ ID NO: 41379 - DNA, 15 bp, Homo sapiens
tcccaacacgtgctc

SEQ ID NO: 41380 - DNA, 15 bp, Homo sapiens
cccaacacgtgctcg

SEQ ID NO: 41381 - DNA, 15 bp, Homo sapiens
ccaacacgtgctcgc

SEQ ID NO: 41382 - DNA, 15 bp, Homo sapiens
caacacgtgctcgct

SEQ ID NO: 41383 - DNA, 15 bp, Homo sapiens
aacacgtgctcgctc

SEQ ID NO: 41384 - DNA, 15 bp, Homo sapiens
acacgtgctcgctca

SEQ ID NO: 41385 - DNA, 15 bp, Homo sapiens
cacgtgctcgctcac

SEQ ID NO: 41386 - DNA, 15 bp, Homo sapiens
acgtgctcgctcaca

SEQ ID NO: 41387 - DNA, 15 bp, Homo sapiens
cgtgctcgctcacac

SEQ ID NO: 41388 - DNA, 15 bp, Homo sapiens
gtgctcgctcacaca

SEQ ID NO: 41389 - DNA, 15 bp, Homo sapiens
tgctcgctcacacac

SEQ ID NO: 41390 - DNA, 15 bp, Homo sapiens
gctcgctcacacaca

SEQ ID NO: 41391 - DNA, 15 bp, Homo sapiens
ctcgctcacacacac

SEQ ID NO: 41392 - DNA, 15 bp, Homo sapiens
tcgctcacacacacg

SEQ ID NO: 41393 - DNA, 15 bp, Homo sapiens
cgctcacacacacgg

SEQ ID NO: 41394 - DNA, 15 bp, Homo sapiens
gctcacacacacggc

SEQ ID NO: 41395 - DNA, 15 bp, Homo sapiens
ctcacacacacggcc

SEQ ID NO: 41396 - DNA, 15 bp, Homo sapiens
tcacacacacggcct

SEQ ID NO: 41397 - DNA, 15 bp, Homo sapiens
cacacacacggcctg

SEQ ID NO: 41398 - DNA, 15 bp, Homo sapiens
acacacacggcctgt

SEQ ID NO: 41399 - DNA, 15 bp, Homo sapiens
cacacacggcctgtt

SEQ ID NO: 41400 - DNA, 15 bp, Homo sapiens
acacacggcctgtta

SEQ ID NO: 41401 - DNA, 15 bp, Homo sapiens
cacacggcctgttag

SEQ ID NO: 41402 - DNA, 15 bp, Homo sapiens
acacggcctgttaga

SEQ ID NO: 41403 - DNA, 15 bp, Homo sapiens
cacggcctgttagaa

SEQ ID NO: 41404 - DNA, 15 bp, Homo sapiens
acggcctgttagaat

SEQ ID NO: 41405 - DNA, 15 bp, Homo sapiens
cggcctgttagaatt

SEQ ID NO: 41406 - DNA, 15 bp, Homo sapiens
ggcctgttagaattc

SEQ ID NO: 41407 - DNA, 15 bp, Homo sapiens
gcctgttagaattca

SEQ ID NO: 41408 - DNA, 15 bp, Homo sapiens
cctgttagaattcac

SEQ ID NO: 41409 - DNA, 15 bp, Homo sapiens
ctgttagaattcacc

SEQ ID NO: 41410 - DNA, 15 bp, Homo sapiens
tgttagaattcacct

SEQ ID NO: 41411 - DNA, 15 bp, Homo sapiens
gttagaattcacctg

SEQ ID NO: 41412 - DNA, 15 bp, Homo sapiens
ttagaattcacctgt

SEQ ID NO: 41413 - DNA, 15 bp, Homo sapiens
tagaattcacctgtg

SEQ ID NO: 41414 - DNA, 15 bp, Homo sapiens
agaattcacctgtgt

SEQ ID NO: 41415 - DNA, 15 bp, Homo sapiens
gaattcacctgtgta

SEQ ID NO: 41416 - DNA, 15 bp, Homo sapiens
aattcacctgtgtat

SEQ ID NO: 41417 - DNA, 15 bp, Homo sapiens
attcacctgtgtatc

SEQ ID NO: 41418 - DNA, 15 bp, Homo sapiens
ttcacctgtgtatct

SEQ ID NO: 41419 - DNA, 15 bp, Homo sapiens
tcacctgtgtatctc

SEQ ID NO: 41420 - DNA, 15 bp, Homo sapiens
cacctgtgtatctca

SEQ ID NO: 41421 - DNA, 15 bp, Homo sapiens
acctgtgtatctcac

SEQ ID NO: 41422 - DNA, 15 bp, Homo sapiens
cctgtgtatctcacg

SEQ ID NO: 41423 - DNA, 15 bp, Homo sapiens
ctgtgtatctcacgc

SEQ ID NO: 41424 - DNA, 15 bp, Homo sapiens
tgtgtatctcacgca

SEQ ID NO: 41425 - DNA, 15 bp, Homo sapiens
gtgtatctcacgcat

SEQ ID NO: 41426 - DNA, 15 bp, Homo sapiens
tgtatctcacgcata

SEQ ID NO: 41427 - DNA, 15 bp, Homo sapiens
gtatctcacgcatat

SEQ ID NO: 41428 - DNA, 15 bp, Homo sapiens
tatctcacgcatatg

SEQ ID NO: 41429 - DNA, 15 bp, Homo sapiens
atctcacgcatatgc

SEQ ID NO: 41430 - DNA, 15 bp, Homo sapiens
tctcacgcatatgca

SEQ ID NO: 41431 - DNA, 15 bp, Homo sapiens
ctcacgcatatgcac

SEQ ID NO: 41432 - DNA, 15 bp, Homo sapiens
tcacgcatatgcaca

SEQ ID NO: 41433 - DNA, 15 bp, Homo sapiens
cacgcatatgcacac

SEQ ID NO: 41434 - DNA, 15 bp, Homo sapiens
acgcatatgcacacg

SEQ ID NO: 41435 - DNA, 15 bp, Homo sapiens
cgcatatgcacacgc

SEQ ID NO: 41436 - DNA, 15 bp, Homo sapiens
gcatatgcacacgca

SEQ ID NO: 41437 - DNA, 15 bp, Homo sapiens
catatgcacacgcac

SEQ ID NO: 41438 - DNA, 15 bp, Homo sapiens
atatgcacacgcaca

SEQ ID NO: 41439 - DNA, 15 bp, Homo sapiens
tatgcacacgcacag

SEQ ID NO: 41440 - DNA, 15 bp, Homo sapiens
atgcacacgcacagc

SEQ ID NO: 41441 - DNA, 15 bp, Homo sapiens
tgcacacgcacagcc

SEQ ID NO: 41442 - DNA, 15 bp, Homo sapiens
gcacacgcacagccc

SEQ ID NO: 41443 - DNA, 15 bp, Homo sapiens
cacacgcacagcccc

SEQ ID NO: 41444 - DNA, 15 bp, Homo sapiens
acacgcacagccccc

SEQ ID NO: 41445 - DNA, 15 bp, Homo sapiens
cacgcacagcccccc

SEQ ID NO: 41446 - DNA, 15 bp, Homo sapiens
acgcacagcccccca

SEQ ID NO: 41447 - DNA, 15 bp, Homo sapiens
cgcacagccccccag

SEQ ID NO: 41448 - DNA, 15 bp, Homo sapiens
gcacagccccccagt

SEQ ID NO: 41449 - DNA, 15 bp, Homo sapiens
cacagccccccagtg

SEQ ID NO: 41450 - DNA, 15 bp, Homo sapiens
acagccccccagtgg

SEQ ID NO: 41451 - DNA, 15 bp, Homo sapiens
cagccccccagtggg

SEQ ID NO: 41452 - DNA, 15 bp, Homo sapiens
agccccccagtgggt

SEQ ID NO: 41453 - DNA, 15 bp, Homo sapiens
gccccccagtgggtc

SEQ ID NO: 41454 - DNA, 15 bp, Homo sapiens
ccccccagtgggtct

SEQ ID NO: 41455 - DNA, 15 bp, Homo sapiens
cccccagtgggtctc

SEQ ID NO: 41456 - DNA, 15 bp, Homo sapiens
ccccagtgggtctct

SEQ ID NO: 41457 - DNA, 15 bp, Homo sapiens
cccagtgggtctctt

SEQ ID NO: 41458 - DNA, 15 bp, Homo sapiens
ccagtgggtctcttg

SEQ ID NO: 41459 - DNA, 15 bp, Homo sapiens
cagtgggtctcttga

SEQ ID NO: 41460 - DNA, 15 bp, Homo sapiens
agtgggtctcttgag

SEQ ID NO: 41461 - DNA, 15 bp, Homo sapiens
gtgggtctcttgagt

SEQ ID NO: 41462 - DNA, 15 bp, Homo sapiens
tgggtctcttgagtc

SEQ ID NO: 41463 - DNA, 15 bp, Homo sapiens
gggtctcttgagtcc

SEQ ID NO: 41464 - DNA, 15 bp, Homo sapiens
ggtctcttgagtccc

SEQ ID NO: 41465 - DNA, 15 bp, Homo sapiens
gtctcttgagtcccg

SEQ ID NO: 41466 - DNA, 15 bp, Homo sapiens
tctcttgagtcccgt

SEQ ID NO: 41467 - DNA, 15 bp, Homo sapiens
ctcttgagtcccgtg

SEQ ID NO: 41468 - DNA, 15 bp, Homo sapiens
tcttgagtcccgtgc

SEQ ID NO: 41469 - DNA, 15 bp, Homo sapiens
cttgagtcccgtgca

SEQ ID NO: 41470 - DNA, 15 bp, Homo sapiens
ttgagtcccgtgcag

SEQ ID NO: 41471 - DNA, 15 bp, Homo sapiens
tgagtcccgtgcaga

SEQ ID NO: 41472 - DNA, 15 bp, Homo sapiens
gagtcccgtgcagac

SEQ ID NO: 41473 - DNA, 15 bp, Homo sapiens
agtcccgtgcagaca

SEQ ID NO: 41474 - DNA, 15 bp, Homo sapiens
gtcccgtgcagacac

SEQ ID NO: 41475 - DNA, 15 bp, Homo sapiens
tcccgtgcagacaca

SEQ ID NO: 41476 - DNA, 15 bp, Homo sapiens
cccgtgcagacacac

SEQ ID NO: 41477 - DNA, 15 bp, Homo sapiens
ccgtgcagacacaca

SEQ ID NO: 41478 - DNA, 15 bp, Homo sapiens
cgtgcagacacacac

SEQ ID NO: 41479 - DNA, 15 bp, Homo sapiens
gtgcagacacacaca

SEQ ID NO: 41480 - DNA, 15 bp, Homo sapiens
tgcagacacacacag

SEQ ID NO: 41481 - DNA, 15 bp, Homo sapiens
gcagacacacacagc

SEQ ID NO: 41482 - DNA, 15 bp, Homo sapiens
cagacacacacagcc

SEQ ID NO: 41483 - DNA, 15 bp, Homo sapiens
agacacacacagcca

SEQ ID NO: 41484 - DNA, 15 bp, Homo sapiens
gacacacacagccac

SEQ ID NO: 41485 - DNA, 15 bp, Homo sapiens
acacacacagccaca

SEQ ID NO: 41486 - DNA, 15 bp, Homo sapiens
cacacacagccacac

SEQ ID NO: 41487 - DNA, 15 bp, Homo sapiens
acacacagccacaca

SEQ ID NO: 41488 - DNA, 15 bp, Homo sapiens
cacacagccacacac

SEQ ID NO: 41489 - DNA, 15 bp, Homo sapiens
acacagccacacaca

SEQ ID NO: 41490 - DNA, 15 bp, Homo sapiens
cacagccacacacac

SEQ ID NO: 41491 - DNA, 15 bp, Homo sapiens
acagccacacacact

SEQ ID NO: 41492 - DNA, 15 bp, Homo sapiens
cagccacacacactg

SEQ ID NO: 41493 - DNA, 15 bp, Homo sapiens
agccacacacactgc

SEQ ID NO: 41494 - DNA, 15 bp, Homo sapiens
gccacacacactgcc

SEQ ID NO: 41495 - DNA, 15 bp, Homo sapiens
ccacacacactgcct

SEQ ID NO: 41496 - DNA, 15 bp, Homo sapiens
cacacacactgcctt

SEQ ID NO: 41497 - DNA, 15 bp, Homo sapiens
acacacactgccttg

SEQ ID NO: 41498 - DNA, 15 bp, Homo sapiens
cacacactgccttgc

SEQ ID NO: 41499 - DNA, 15 bp, Homo sapiens
acacactgccttgcc

SEQ ID NO: 41500 - DNA, 15 bp, Homo sapiens
cacactgccttgcca

SEQ ID NO: 41501 - DNA, 15 bp, Homo sapiens
acactgccttgccaa

SEQ ID NO: 41502 - DNA, 15 bp, Homo sapiens
cactgccttgccaaa

SEQ ID NO: 41503 - DNA, 15 bp, Homo sapiens
actgccttgccaaaa

SEQ ID NO: 41504 - DNA, 15 bp, Homo sapiens
ctgccttgccaaaaa

SEQ ID NO: 41505 - DNA, 15 bp, Homo sapiens
tgccttgccaaaaat

SEQ ID NO: 41506 - DNA, 15 bp, Homo sapiens
gccttgccaaaaata

SEQ ID NO: 41507 - DNA, 15 bp, Homo sapiens
ccttgccaaaaatac

SEQ ID NO: 41508 - DNA, 15 bp, Homo sapiens
cttgccaaaaatacc

SEQ ID NO: 41509 - DNA, 15 bp, Homo sapiens
ttgccaaaaataccc

SEQ ID NO: 41510 - DNA, 15 bp, Homo sapiens
tgccaaaaatacccc

SEQ ID NO: 41511 - DNA, 15 bp, Homo sapiens
gccaaaaataccccg

SEQ ID NO: 41512 - DNA, 15 bp, Homo sapiens
ccaaaaataccccgt

SEQ ID NO: 41513 - DNA, 15 bp, Homo sapiens
caaaaataccccgtg

SEQ ID NO: 41514 - DNA, 15 bp, Homo sapiens
aaaaataccccgtgt

SEQ ID NO: 41515 - DNA, 15 bp, Homo sapiens
aaaataccccgtgtc

SEQ ID NO: 41516 - DNA, 15 bp, Homo sapiens
aaataccccgtgtct

SEQ ID NO: 41517 - DNA, 15 bp, Homo sapiens
aataccccgtgtctc

SEQ ID NO: 41518 - DNA, 15 bp, Homo sapiens
ataccccgtgtctcc

SEQ ID NO: 41519 - DNA, 15 bp, Homo sapiens
taccccgtgtctccc

SEQ ID NO: 41520 - DNA, 15 bp, Homo sapiens
accccgtgtctcccc

SEQ ID NO: 41521 - DNA, 15 bp, Homo sapiens
ccccgtgtctcccct

SEQ ID NO: 41522 - DNA, 15 bp, Homo sapiens
cccgtgtctcccctg

SEQ ID NO: 41523 - DNA, 15 bp, Homo sapiens
ccgtgtctcccctgc

SEQ ID NO: 41524 - DNA, 15 bp, Homo sapiens
cgtgtctcccctgcc

SEQ ID NO: 41525 - DNA, 15 bp, Homo sapiens
gtgtctcccctgcca

SEQ ID NO: 41526 - DNA, 15 bp, Homo sapiens
tgtctcccctgccac

SEQ ID NO: 41527 - DNA, 15 bp, Homo sapiens
gtctcccctgccact

SEQ ID NO: 41528 - DNA, 15 bp, Homo sapiens
tctcccctgccactc

SEQ ID NO: 41529 - DNA, 15 bp, Homo sapiens
ctcccctgccactca

SEQ ID NO: 41530 - DNA, 15 bp, Homo sapiens
tcccctgccactcac

SEQ ID NO: 41531 - DNA, 15 bp, Homo sapiens
cccctgccactcacc

SEQ ID NO: 41532 - DNA, 15 bp, Homo sapiens
ccctgccactcacct

SEQ ID NO: 41533 - DNA, 15 bp, Homo sapiens
cctgccactcacctc

SEQ ID NO: 41534 - DNA, 15 bp, Homo sapiens
ctgccactcacctca

SEQ ID NO: 41535 - DNA, 15 bp, Homo sapiens
tgccactcacctcac

SEQ ID NO: 41536 - DNA, 15 bp, Homo sapiens
gccactcacctcact

SEQ ID NO: 41537 - DNA, 15 bp, Homo sapiens
ccactcacctcactc

SEQ ID NO: 41538 - DNA, 15 bp, Homo sapiens
cactcacctcactcc

SEQ ID NO: 41539 - DNA, 15 bp, Homo sapiens
actcacctcactccc

SEQ ID NO: 41540 - DNA, 15 bp, Homo sapiens
ctcacctcactccca

SEQ ID NO: 41541 - DNA, 15 bp, Homo sapiens
tcacctcactcccat

SEQ ID NO: 41542 - DNA, 15 bp, Homo sapiens
cacctcactcccatt

SEQ ID NO: 41543 - DNA, 15 bp, Homo sapiens
acctcactcccattc

SEQ ID NO: 41544 - DNA, 15 bp, Homo sapiens
cctcactcccattcc

SEQ ID NO: 41545 - DNA, 15 bp, Homo sapiens
ctcactcccattccc

SEQ ID NO: 41546 - DNA, 15 bp, Homo sapiens
tcactcccattccct

SEQ ID NO: 41547 - DNA, 15 bp, Homo sapiens
cactcccattccctg

SEQ ID NO: 41548 - DNA, 15 bp, Homo sapiens
actcccattccctga

SEQ ID NO: 41549 - DNA, 15 bp, Homo sapiens
ctcccattccctgag

SEQ ID NO: 41550 - DNA, 15 bp, Homo sapiens
tcccattccctgagc

SEQ ID NO: 41551 - DNA, 15 bp, Homo sapiens
cccattccctgagcc

SEQ ID NO: 41552 - DNA, 15 bp, Homo sapiens
ccattccctgagccc

SEQ ID NO: 41553 - DNA, 15 bp, Homo sapiens
cattccctgagccct

SEQ ID NO: 41554 - DNA, 15 bp, Homo sapiens
attccctgagccctg

SEQ ID NO: 41555 - DNA, 15 bp, Homo sapiens
ttccctgagccctga

SEQ ID NO: 41556 - DNA, 15 bp, Homo sapiens
tccctgagccctgat

SEQ ID NO: 41557 - DNA, 15 bp, Homo sapiens
ccctgagccctgatc

SEQ ID NO: 41558 - DNA, 15 bp, Homo sapiens
cctgagccctgatcc

SEQ ID NO: 41559 - DNA, 15 bp, Homo sapiens
ctgagccctgatcca

SEQ ID NO: 41560 - DNA, 15 bp, Homo sapiens
tgagccctgatccat

SEQ ID NO: 41561 - DNA, 15 bp, Homo sapiens
gagccctgatccatg

SEQ ID NO: 41562 - DNA, 15 bp, Homo sapiens
agccctgatccatgc

SEQ ID NO: 41563 - DNA, 15 bp, Homo sapiens
gccctgatccatgcc

SEQ ID NO: 41564 - DNA, 15 bp, Homo sapiens
ccctgatccatgcct

SEQ ID NO: 41565 - DNA, 15 bp, Homo sapiens
cctgatccatgcctc

SEQ ID NO: 41566 - DNA, 15 bp, Homo sapiens
ctgatccatgcctca

SEQ ID NO: 41567 - DNA, 15 bp, Homo sapiens
tgatccatgcctcag

SEQ ID NO: 41568 - DNA, 15 bp, Homo sapiens
gatccatgcctcagc

SEQ ID NO: 41569 - DNA, 15 bp, Homo sapiens
atccatgcctcagct

SEQ ID NO: 41570 - DNA, 15 bp, Homo sapiens
tccatgcctcagctt

SEQ ID NO: 41571 - DNA, 15 bp, Homo sapiens
ccatgcctcagctta

SEQ ID NO: 41572 - DNA, 15 bp, Homo sapiens
catgcctcagcttag

SEQ ID NO: 41573 - DNA, 15 bp, Homo sapiens
atgcctcagcttaga

SEQ ID NO: 41574 - DNA, 15 bp, Homo sapiens
tgcctcagcttagac

SEQ ID NO: 41575 - DNA, 15 bp, Homo sapiens
gcctcagcttagact

SEQ ID NO: 41576 - DNA, 15 bp, Homo sapiens
cctcagcttagactg

SEQ ID NO: 41577 - DNA, 15 bp, Homo sapiens
ctcagcttagactgc

SEQ ID NO: 41578 - DNA, 15 bp, Homo sapiens
tcagcttagactgca

SEQ ID NO: 41579 - DNA, 15 bp, Homo sapiens
cagcttagactgcag

SEQ ID NO: 41580 - DNA, 15 bp, Homo sapiens
agcttagactgcaga

SEQ ID NO: 41581 - DNA, 15 bp, Homo sapiens
gcttagactgcagag

SEQ ID NO: 41582 - DNA, 15 bp, Homo sapiens
cttagactgcagagg

SEQ ID NO: 41583 - DNA, 15 bp, Homo sapiens
ttagactgcagagga

SEQ ID NO: 41584 - DNA, 15 bp, Homo sapiens
tagactgcagaggaa

SEQ ID NO: 41585 - DNA, 15 bp, Homo sapiens
agactgcagaggaac

SEQ ID NO: 41586 - DNA, 15 bp, Homo sapiens
gactgcagaggaact

SEQ ID NO: 41587 - DNA, 15 bp, Homo sapiens
actgcagaggaacta

SEQ ID NO: 41588 - DNA, 15 bp, Homo sapiens
ctgcagaggaactac

SEQ ID NO: 41589 - DNA, 15 bp, Homo sapiens
tgcagaggaactact

SEQ ID NO: 41590 - DNA, 15 bp, Homo sapiens
gcagaggaactactc

SEQ ID NO: 41591 - DNA, 15 bp, Homo sapiens
cagaggaactactca

SEQ ID NO: 41592 - DNA, 15 bp, Homo sapiens
agaggaactactcat

SEQ ID NO: 41593 - DNA, 15 bp, Homo sapiens
gaggaactactcatt

SEQ ID NO: 41594 - DNA, 15 bp, Homo sapiens
aggaactactcattt

SEQ ID NO: 41595 - DNA, 15 bp, Homo sapiens
ggaactactcattta

SEQ ID NO: 41596 - DNA, 15 bp, Homo sapiens
gaactactcatttat

SEQ ID NO: 41597 - DNA, 15 bp, Homo sapiens
aactactcatttatt

SEQ ID NO: 41598 - DNA, 15 bp, Homo sapiens
actactcatttattt

SEQ ID NO: 41599 - DNA, 15 bp, Homo sapiens
ctactcatttatttg

SEQ ID NO: 41600 - DNA, 15 bp, Homo sapiens
tactcatttatttgg

SEQ ID NO: 41601 - DNA, 15 bp, Homo sapiens
actcatttatttggg

SEQ ID NO: 41602 - DNA, 15 bp, Homo sapiens
ctcatttatttggga

SEQ ID NO: 41603 - DNA, 15 bp, Homo sapiens
tcatttatttgggat

SEQ ID NO: 41604 - DNA, 15 bp, Homo sapiens
catttatttgggatc

SEQ ID NO: 41605 - DNA, 15 bp, Homo sapiens
atttatttgggatcc

SEQ ID NO: 41606 - DNA, 15 bp, Homo sapiens
tttatttgggatcca

SEQ ID NO: 41607 - DNA, 15 bp, Homo sapiens
ttatttgggatccaa

SEQ ID NO: 41608 - DNA, 15 bp, Homo sapiens
tatttgggatccaag

SEQ ID NO: 41609 - DNA, 15 bp, Homo sapiens
atttgggatccaagg

SEQ ID NO: 41610 - DNA, 15 bp, Homo sapiens
tttgggatccaaggc

SEQ ID NO: 41611 - DNA, 15 bp, Homo sapiens
ttgggatccaaggcc

SEQ ID NO: 41612 - DNA, 15 bp, Homo sapiens
tgggatccaaggccc

SEQ ID NO: 41613 - DNA, 15 bp, Homo sapiens
gggatccaaggcccc

SEQ ID NO: 41614 - DNA, 15 bp, Homo sapiens
ggatccaaggccccc

SEQ ID NO: 41615 - DNA, 15 bp, Homo sapiens
gatccaaggccccca

SEQ ID NO: 41616 - DNA, 15 bp, Homo sapiens
atccaaggcccccaa

SEQ ID NO: 41617 - DNA, 15 bp, Homo sapiens
tccaaggcccccaac

SEQ ID NO: 41618 - DNA, 15 bp, Homo sapiens
ccaaggcccccaacc

SEQ ID NO: 41619 - DNA, 15 bp, Homo sapiens
caaggcccccaaccc

SEQ ID NO: 41620 - DNA, 15 bp, Homo sapiens
aaggcccccaaccca

SEQ ID NO: 41621 - DNA, 15 bp, Homo sapiens
aggcccccaacccac

SEQ ID NO: 41622 - DNA, 15 bp, Homo sapiens
ggcccccaacccaca

SEQ ID NO: 41623 - DNA, 15 bp, Homo sapiens
gcccccaacccacag

SEQ ID NO: 41624 - DNA, 15 bp, Homo sapiens
cccccaacccacagt

SEQ ID NO: 41625 - DNA, 15 bp, Homo sapiens
ccccaacccacagta

SEQ ID NO: 41626 - DNA, 15 bp, Homo sapiens
cccaacccacagtac

SEQ ID NO: 41627 - DNA, 15 bp, Homo sapiens
ccaacccacagtacc

SEQ ID NO: 41628 - DNA, 15 bp, Homo sapiens
caacccacagtaccg

SEQ ID NO: 41629 - DNA, 15 bp, Homo sapiens
aacccacagtaccgt

SEQ ID NO: 41630 - DNA, 15 bp, Homo sapiens
acccacagtaccgtc

SEQ ID NO: 41631 - DNA, 15 bp, Homo sapiens
cccacagtaccgtcc

SEQ ID NO: 41632 - DNA, 15 bp, Homo sapiens
ccacagtaccgtccc

SEQ ID NO: 41633 - DNA, 15 bp, Homo sapiens
cacagtaccgtcccc

SEQ ID NO: 41634 - DNA, 15 bp, Homo sapiens
acagtaccgtcccca

SEQ ID NO: 41635 - DNA, 15 bp, Homo sapiens
cagtaccgtccccaa

SEQ ID NO: 41636 - DNA, 15 bp, Homo sapiens
agtaccgtccccaat

SEQ ID NO: 41637 - DNA, 15 bp, Homo sapiens
gtaccgtccccaata

SEQ ID NO: 41638 - DNA, 15 bp, Homo sapiens
taccgtccccaataa

SEQ ID NO: 41639 - DNA, 15 bp, Homo sapiens
accgtccccaataaa

SEQ ID NO: 41640 - DNA, 15 bp, Homo sapiens
ccgtccccaataaac

SEQ ID NO: 41641 - DNA, 15 bp, Homo sapiens
cgtccccaataaact

SEQ ID NO: 41642 - DNA, 15 bp, Homo sapiens
gtccccaataaactg

SEQ ID NO: 41643 - DNA, 15 bp, Homo sapiens
tccccaataaactgc

SEQ ID NO: 41644 - DNA, 15 bp, Homo sapiens
ccccaataaactgca

SEQ ID NO: 41645 - DNA, 15 bp, Homo sapiens
cccaataaactgcag

SEQ ID NO: 41646 - DNA, 15 bp, Homo sapiens
ccaataaactgcagc

SEQ ID NO: 41647 - DNA, 15 bp, Homo sapiens
caataaactgcagcc

SEQ ID NO: 41648 - DNA, 15 bp, Homo sapiens
aataaactgcagccg

SEQ ID NO: 41649 - DNA, 15 bp, Homo sapiens
ataaactgcagccga

SEQ ID NO: 41650 - DNA, 15 bp, Homo sapiens
taaactgcagccgag

SEQ ID NO: 41651 - DNA, 15 bp, Homo sapiens
aaactgcagccgagc

SEQ ID NO: 41652 - DNA, 15 bp, Homo sapiens
aactgcagccgagct

SEQ ID NO: 41653 - DNA, 15 bp, Homo sapiens
actgcagccgagctc

SEQ ID NO: 41654 - DNA, 15 bp, Homo sapiens
ctgcagccgagctcc

SEQ ID NO: 41655 - DNA, 15 bp, Homo sapiens
tgcagccgagctccc

SEQ ID NO: 41656 - DNA, 15 bp, Homo sapiens
gcagccgagctcccc

SEQ ID NO: 41657 - DNA, 15 bp, Homo sapiens
cagccgagctcccca

SEQ ID NO: 41658 - DNA, 15 bp, Homo sapiens
agccgagctccccac

SEQ ID NO: 41659 - DNA, 15 bp, Homo sapiens
gccgagctccccaca

SEQ ID NO: 41660 - DNA, 15 bp, Homo sapiens
ccgagctccccacat

SEQ ID NO: 41661 - DNA, 15 bp, Homo sapiens
cgagctccccacatg

SEQ ID NO: 41662 - DNA, 15 bp, Homo sapiens
gagctccccacatgc

SEQ ID NO: 41663 - DNA, 15 bp, Homo sapiens
agctccccacatgct

SEQ ID NO: 41664 - DNA, 15 bp, Homo sapiens
gctccccacatgctg

SEQ ID NO: 41665 - DNA, 15 bp, Homo sapiens
ctccccacatgctgg

SEQ ID NO: 41666 - DNA, 15 bp, Homo sapiens
tccccacatgctgga

SEQ ID NO: 41667 - DNA, 15 bp, Homo sapiens
ccccacatgctggac

SEQ ID NO: 41668 - DNA, 15 bp, Homo sapiens
cccacatgctggact

SEQ ID NO: 41669 - DNA, 15 bp, Homo sapiens
ccacatgctggacta

SEQ ID NO: 41670 - DNA, 15 bp, Homo sapiens
cacatgctggactat

SEQ ID NO: 41671 - DNA, 15 bp, Homo sapiens
acatgctggactatc

SEQ ID NO: 41672 - DNA, 15 bp, Homo sapiens
catgctggactatca

SEQ ID NO: 41673 - DNA, 15 bp, Homo sapiens
atgctggactatcac

SEQ ID NO: 41674 - DNA, 15 bp, Homo sapiens
tgctggactatcacc

SEQ ID NO: 41675 - DNA, 15 bp, Homo sapiens
gctggactatcaccc

SEQ ID NO: 41676 - DNA, 15 bp, Homo sapiens
ctggactatcacccc

SEQ ID NO: 41677 - DNA, 15 bp, Homo sapiens
tggactatcacccca

SEQ ID NO: 41678 - DNA, 15 bp, Homo sapiens
ggactatcaccccat

SEQ ID NO: 41679 - DNA, 15 bp, Homo sapiens
gactatcaccccata

SEQ ID NO: 41680 - DNA, 15 bp, Homo sapiens
actatcaccccatat

SEQ ID NO: 41681 - DNA, 15 bp, Homo sapiens
ctatcaccccatata

SEQ ID NO: 41682 - DNA, 15 bp, Homo sapiens
tatcaccccatataa

SEQ ID NO: 41683 - DNA, 15 bp, Homo sapiens
atcaccccatataag

SEQ ID NO: 41684 - DNA, 15 bp, Homo sapiens
tcaccccatataagg

SEQ ID NO: 41685 - DNA, 15 bp, Homo sapiens
caccccatataaggg

SEQ ID NO: 41686 - DNA, 15 bp, Homo sapiens
accccatataagggt

SEQ ID NO: 41687 - DNA, 15 bp, Homo sapiens
ccccatataagggtt

SEQ ID NO: 41688 - DNA, 15 bp, Homo sapiens
cccatataagggttg

SEQ ID NO: 41689 - DNA, 15 bp, Homo sapiens
ccatataagggttgc

SEQ ID NO: 41690 - DNA, 15 bp, Homo sapiens
catataagggttgcg

SEQ ID NO: 41691 - DNA, 15 bp, Homo sapiens
atataagggttgcgg

SEQ ID NO: 41692 - DNA, 15 bp, Homo sapiens
tataagggttgcggt

SEQ ID NO: 41693 - DNA, 15 bp, Homo sapiens
ataagggttgcggtc

SEQ ID NO: 41694 - DNA, 15 bp, Homo sapiens
taagggttgcggtca

SEQ ID NO: 41695 - DNA, 15 bp, Homo sapiens
aagggttgcggtcag

SEQ ID NO: 41696 - DNA, 15 bp, Homo sapiens
agggttgcggtcagt

SEQ ID NO: 41697 - DNA, 15 bp, Homo sapiens
gggttgcggtcagtg

SEQ ID NO: 41698 - DNA, 15 bp, Homo sapiens
ggttgcggtcagtgg

SEQ ID NO: 41699 - DNA, 15 bp, Homo sapiens
gttgcggtcagtggg

SEQ ID NO: 41700 - DNA, 15 bp, Homo sapiens
ttgcggtcagtgggc

SEQ ID NO: 41701 - DNA, 15 bp, Homo sapiens
tgcggtcagtgggca

SEQ ID NO: 41702 - DNA, 15 bp, Homo sapiens
gcggtcagtgggcag

SEQ ID NO: 41703 - DNA, 15 bp, Homo sapiens
cggtcagtgggcagg

SEQ ID NO: 41704 - DNA, 15 bp, Homo sapiens
ggtcagtgggcaggg

SEQ ID NO: 41705 - DNA, 15 bp, Homo sapiens
gtcagtgggcagggg

SEQ ID NO: 41706 - DNA, 15 bp, Homo sapiens
tcagtgggcaggggt

SEQ ID NO: 41707 - DNA, 15 bp, Homo sapiens
cagtgggcaggggtc

SEQ ID NO: 41708 - DNA, 15 bp, Homo sapiens
agtgggcaggggtct

SEQ ID NO: 41709 - DNA, 15 bp, Homo sapiens
gtgggcaggggtctg

SEQ ID NO: 41710 - DNA, 15 bp, Homo sapiens
tgggcaggggtctgg

SEQ ID NO: 41711 - DNA, 15 bp, Homo sapiens
gggcaggggtctggg

SEQ ID NO: 41712 - DNA, 15 bp, Homo sapiens
ggcaggggtctgggt

SEQ ID NO: 41713 - DNA, 15 bp, Homo sapiens
gcaggggtctgggtc

SEQ ID NO: 41714 - DNA, 15 bp, Homo sapiens
caggggtctgggtcc

SEQ ID NO: 41715 - DNA, 15 bp, Homo sapiens
aggggtctgggtcca

SEQ ID NO: 41716 - DNA, 15 bp, Homo sapiens
ggggtctgggtccaa

SEQ ID NO: 41717 - DNA, 15 bp, Homo sapiens
gggtctgggtccaag

SEQ ID NO: 41718 - DNA, 15 bp, Homo sapiens
ggtctgggtccaagg

SEQ ID NO: 41719 - DNA, 15 bp, Homo sapiens
gtctgggtccaaggc

SEQ ID NO: 41720 - DNA, 15 bp, Homo sapiens
tctgggtccaaggcc

SEQ ID NO: 41721 - DNA, 15 bp, Homo sapiens
ctgggtccaaggccg

SEQ ID NO: 41722 - DNA, 15 bp, Homo sapiens
tgggtccaaggccgc

SEQ ID NO: 41723 - DNA, 15 bp, Homo sapiens
gggtccaaggccgca

SEQ ID NO: 41724 - DNA, 15 bp, Homo sapiens
ggtccaaggccgcag

SEQ ID NO: 41725 - DNA, 15 bp, Homo sapiens
gtccaaggccgcagc

SEQ ID NO: 41726 - DNA, 15 bp, Homo sapiens
tccaaggccgcagca

SEQ ID NO: 41727 - DNA, 15 bp, Homo sapiens
ccaaggccgcagcag

SEQ ID NO: 41728 - DNA, 15 bp, Homo sapiens
caaggccgcagcagg

SEQ ID NO: 41729 - DNA, 15 bp, Homo sapiens
aaggccgcagcagga

SEQ ID NO: 41730 - DNA, 15 bp, Homo sapiens
aggccgcagcaggag

SEQ ID NO: 41731 - DNA, 15 bp, Homo sapiens
ggccgcagcaggagg

SEQ ID NO: 41732 - DNA, 15 bp, Homo sapiens
gccgcagcaggagga

SEQ ID NO: 41733 - DNA, 15 bp, Homo sapiens
ccgcagcaggaggaa

SEQ ID NO: 41734 - DNA, 15 bp, Homo sapiens
cgcagcaggaggaac

SEQ ID NO: 41735 - DNA, 15 bp, Homo sapiens
gcagcaggaggaact

SEQ ID NO: 41736 - DNA, 15 bp, Homo sapiens
cagcaggaggaactg

SEQ ID NO: 41737 - DNA, 15 bp, Homo sapiens
agcaggaggaactgg

SEQ ID NO: 41738 - DNA, 15 bp, Homo sapiens
gcaggaggaactgga

SEQ ID NO: 41739 - DNA, 15 bp, Homo sapiens
caggaggaactggac

SEQ ID NO: 41740 - DNA, 15 bp, Homo sapiens
aggaggaactggaca

SEQ ID NO: 41741 - DNA, 15 bp, Homo sapiens
ggaggaactggacag

SEQ ID NO: 41742 - DNA, 15 bp, Homo sapiens
gaggaactggacagc

SEQ ID NO: 41743 - DNA, 15 bp, Homo sapiens
aggaactggacagcg

SEQ ID NO: 41744 - DNA, 15 bp, Homo sapiens
ggaactggacagcgg

SEQ ID NO: 41745 - DNA, 15 bp, Homo sapiens
gaactggacagcgga

SEQ ID NO: 41746 - DNA, 15 bp, Homo sapiens
aactggacagcggag

SEQ ID NO: 41747 - DNA, 15 bp, Homo sapiens
actggacagcggagg

SEQ ID NO: 41748 - DNA, 15 bp, Homo sapiens
ctggacagcggagga

SEQ ID NO: 41749 - DNA, 15 bp, Homo sapiens
tggacagcggaggaa

SEQ ID NO: 41750 - DNA, 15 bp, Homo sapiens
ggacagcggaggaag

SEQ ID NO: 41751 - DNA, 15 bp, Homo sapiens
gacagcggaggaagt

SEQ ID NO: 41752 - DNA, 15 bp, Homo sapiens
acagcggaggaagta

SEQ ID NO: 41753 - DNA, 15 bp, Homo sapiens
cagcggaggaagtag

SEQ ID NO: 41754 - DNA, 15 bp, Homo sapiens
agcggaggaagtagc

SEQ ID NO: 41755 - DNA, 15 bp, Homo sapiens
gcggaggaagtagct

SEQ ID NO: 41756 - DNA, 15 bp, Homo sapiens
cggaggaagtagcta

SEQ ID NO: 41757 - DNA, 15 bp, Homo sapiens
ggaggaagtagctag

SEQ ID NO: 41758 - DNA, 15 bp, Homo sapiens
gaggaagtagctagg

SEQ ID NO: 41759 - DNA, 15 bp, Homo sapiens
aggaagtagctaggg

SEQ ID NO: 41760 - DNA, 15 bp, Homo sapiens
ggaagtagctagggc

SEQ ID NO: 41761 - DNA, 15 bp, Homo sapiens
gaagtagctagggca

SEQ ID NO: 41762 - DNA, 15 bp, Homo sapiens
aagtagctagggcat

SEQ ID NO: 41763 - DNA, 15 bp, Homo sapiens
agtagctagggcatg

SEQ ID NO: 41764 - DNA, 15 bp, Homo sapiens
gtagctagggcatgt

SEQ ID NO: 41765 - DNA, 15 bp, Homo sapiens
tagctagggcatgtg

SEQ ID NO: 41766 - DNA, 15 bp, Homo sapiens
agctagggcatgtgc

SEQ ID NO: 41767 - DNA, 15 bp, Homo sapiens
gctagggcatgtgct

SEQ ID NO: 41768 - DNA, 15 bp, Homo sapiens
ctagggcatgtgctt

SEQ ID NO: 41769 - DNA, 15 bp, Homo sapiens
tagggcatgtgcttg

SEQ ID NO: 41770 - DNA, 15 bp, Homo sapiens
agggcatgtgcttgg

SEQ ID NO: 41771 - DNA, 15 bp, Homo sapiens
gggcatgtgcttggc

SEQ ID NO: 41772 - DNA, 15 bp, Homo sapiens
ggcatgtgcttggcc

SEQ ID NO: 41773 - DNA, 15 bp, Homo sapiens
gcatgtgcttggcca

SEQ ID NO: 41774 - DNA, 15 bp, Homo sapiens
catgtgcttggccac

SEQ ID NO: 41775 - DNA, 15 bp, Homo sapiens
atgtgcttggccact

SEQ ID NO: 41776 - DNA, 15 bp, Homo sapiens
tgtgcttggccactg

SEQ ID NO: 41777 - DNA, 15 bp, Homo sapiens
gtgcttggccactgc

SEQ ID NO: 41778 - DNA, 15 bp, Homo sapiens
tgcttggccactgcc

SEQ ID NO: 41779 - DNA, 15 bp, Homo sapiens
gcttggccactgcct

SEQ ID NO: 41780 - DNA, 15 bp, Homo sapiens
cttggccactgcctc

SEQ ID NO: 41781 - DNA, 15 bp, Homo sapiens
ttggccactgcctcc

SEQ ID NO: 41782 - DNA, 15 bp, Homo sapiens
tggccactgcctcca

SEQ ID NO: 41783 - DNA, 15 bp, Homo sapiens
ggccactgcctccag

SEQ ID NO: 41784 - DNA, 15 bp, Homo sapiens
gccactgcctccagc

SEQ ID NO: 41785 - DNA, 15 bp, Homo sapiens
ccactgcctccagca

SEQ ID NO: 41786 - DNA, 15 bp, Homo sapiens
cactgcctccagcac

SEQ ID NO: 41787 - DNA, 15 bp, Homo sapiens
actgcctccagcacc

SEQ ID NO: 41788 - DNA, 15 bp, Homo sapiens
ctgcctccagcaccc

SEQ ID NO: 41789 - DNA, 15 bp, Homo sapiens
tgcctccagcacccc

SEQ ID NO: 41790 - DNA, 15 bp, Homo sapiens
gcctccagcacccca

SEQ ID NO: 41791 - DNA, 15 bp, Homo sapiens
cctccagcaccccaa

SEQ ID NO: 41792 - DNA, 15 bp, Homo sapiens
ctccagcaccccaaa

SEQ ID NO: 41793 - DNA, 15 bp, Homo sapiens
tccagcaccccaaat

SEQ ID NO: 41794 - DNA, 15 bp, Homo sapiens
ccagcaccccaaatc

SEQ ID NO: 41795 - DNA, 15 bp, Homo sapiens
cagcaccccaaatcc

SEQ ID NO: 41796 - DNA, 15 bp, Homo sapiens
agcaccccaaatccc

SEQ ID NO: 41797 - DNA, 15 bp, Homo sapiens
gcaccccaaatccct

SEQ ID NO: 41798 - DNA, 15 bp, Homo sapiens
caccccaaatccctg

SEQ ID NO: 41799 - DNA, 15 bp, Homo sapiens
accccaaatccctgc

SEQ ID NO: 41800 - DNA, 15 bp, Homo sapiens
ccccaaatccctgcc

SEQ ID NO: 41801 - DNA, 15 bp, Homo sapiens
cccaaatccctgcct

SEQ ID NO: 41802 - DNA, 15 bp, Homo sapiens
ccaaatccctgcctg

SEQ ID NO: 41803 - DNA, 15 bp, Homo sapiens
caaatccctgcctga

SEQ ID NO: 41804 - DNA, 15 bp, Homo sapiens
aaatccctgcctgag

SEQ ID NO: 41805 - DNA, 15 bp, Homo sapiens
aatccctgcctgagg

SEQ ID NO: 41806 - DNA, 15 bp, Homo sapiens
atccctgcctgaggc

SEQ ID NO: 41807 - DNA, 15 bp, Homo sapiens
tccctgcctgaggct

SEQ ID NO: 41808 - DNA, 15 bp, Homo sapiens
ccctgcctgaggctg

SEQ ID NO: 41809 - DNA, 15 bp, Homo sapiens
cctgcctgaggctgg

SEQ ID NO: 41810 - DNA, 15 bp, Homo sapiens
ctgcctgaggctggg

SEQ ID NO: 41811 - DNA, 15 bp, Homo sapiens
tgcctgaggctgggg

SEQ ID NO: 41812 - DNA, 15 bp, Homo sapiens
gcctgaggctgggga

SEQ ID NO: 41813 - DNA, 15 bp, Homo sapiens
cctgaggctggggag

SEQ ID NO: 41814 - DNA, 15 bp, Homo sapiens
ctgaggctggggaga

SEQ ID NO: 41815 - DNA, 15 bp, Homo sapiens
tgaggctggggagag

SEQ ID NO: 41816 - DNA, 15 bp, Homo sapiens
gaggctggggagaga

SEQ ID NO: 41817 - DNA, 15 bp, Homo sapiens
aggctggggagagac

SEQ ID NO: 41818 - DNA, 15 bp, Homo sapiens
ggctggggagagacc

SEQ ID NO: 41819 - DNA, 15 bp, Homo sapiens
gctggggagagacct

SEQ ID NO: 41820 - DNA, 15 bp, Homo sapiens
ctggggagagacctc

SEQ ID NO: 41821 - DNA, 15 bp, Homo sapiens
tggggagagacctct

SEQ ID NO: 41822 - DNA, 15 bp, Homo sapiens
ggggagagacctctg

SEQ ID NO: 41823 - DNA, 15 bp, Homo sapiens
gggagagacctctgc

SEQ ID NO: 41824 - DNA, 15 bp, Homo sapiens
ggagagacctctgcc

SEQ ID NO: 41825 - DNA, 15 bp, Homo sapiens
gagagacctctgccg

SEQ ID NO: 41826 - DNA, 15 bp, Homo sapiens
agagacctctgccgg

SEQ ID NO: 41827 - DNA, 15 bp, Homo sapiens
gagacctctgccggc

SEQ ID NO: 41828 - DNA, 15 bp, Homo sapiens
agacctctgccggcg

SEQ ID NO: 41829 - DNA, 15 bp, Homo sapiens
gacctctgccggcgg

SEQ ID NO: 41830 - DNA, 15 bp, Homo sapiens
acctctgccggcggc

SEQ ID NO: 41831 - DNA, 15 bp, Homo sapiens
cctctgccggcggct

SEQ ID NO: 41832 - DNA, 15 bp, Homo sapiens
ctctgccggcggctc

SEQ ID NO: 41833 - DNA, 15 bp, Homo sapiens
tctgccggcggctcc

SEQ ID NO: 41834 - DNA, 15 bp, Homo sapiens
ctgccggcggctcct

SEQ ID NO: 41835 - DNA, 15 bp, Homo sapiens
tgccggcggctcctc

SEQ ID NO: 41836 - DNA, 15 bp, Homo sapiens
gccggcggctcctca

SEQ ID NO: 41837 - DNA, 15 bp, Homo sapiens
ccggcggctcctcag

SEQ ID NO: 41838 - DNA, 15 bp, Homo sapiens
cggcggctcctcagg

SEQ ID NO: 41839 - DNA, 15 bp, Homo sapiens
ggcggctcctcaggc

SEQ ID NO: 41840 - DNA, 15 bp, Homo sapiens
gcggctcctcaggcc

SEQ ID NO: 41841 - DNA, 15 bp, Homo sapiens
cggctcctcaggcct

SEQ ID NO: 41842 - DNA, 15 bp, Homo sapiens
ggctcctcaggcctc

SEQ ID NO: 41843 - DNA, 15 bp, Homo sapiens
gctcctcaggcctcc

SEQ ID NO: 41844 - DNA, 15 bp, Homo sapiens
ctcctcaggcctccc

SEQ ID NO: 41845 - DNA, 15 bp, Homo sapiens
tcctcaggcctcccg

SEQ ID NO: 41846 - DNA, 15 bp, Homo sapiens
cctcaggcctcccgg

SEQ ID NO: 41847 - DNA, 15 bp, Homo sapiens
ctcaggcctcccgga

SEQ ID NO: 41848 - DNA, 15 bp, Homo sapiens
tcaggcctcccggac

SEQ ID NO: 41849 - DNA, 15 bp, Homo sapiens
caggcctcccggacc

SEQ ID NO: 41850 - DNA, 15 bp, Homo sapiens
aggcctcccggaccc

SEQ ID NO: 41851 - DNA, 15 bp, Homo sapiens
ggcctcccggacccg

SEQ ID NO: 41852 - DNA, 15 bp, Homo sapiens
gcctcccggacccgg

SEQ ID NO: 41853 - DNA, 15 bp, Homo sapiens
cctcccggacccggc

SEQ ID NO: 41854 - DNA, 15 bp, Homo sapiens
ctcccggacccggcc

SEQ ID NO: 41855 - DNA, 15 bp, Homo sapiens
tcccggacccggcct

SEQ ID NO: 41856 - DNA, 15 bp, Homo sapiens
cccggacccggccta

SEQ ID NO: 41857 - DNA, 15 bp, Homo sapiens
ccggacccggcctag

SEQ ID NO: 41858 - DNA, 15 bp, Homo sapiens
cggacccggcctagg

SEQ ID NO: 41859 - DNA, 15 bp, Homo sapiens
ggacccggcctagga

SEQ ID NO: 41860 - DNA, 15 bp, Homo sapiens
gacccggcctaggag

SEQ ID NO: 41861 - DNA, 15 bp, Homo sapiens
acccggcctaggagg

SEQ ID NO: 41862 - DNA, 15 bp, Homo sapiens
cccggcctaggaggc

SEQ ID NO: 41863 - DNA, 15 bp, Homo sapiens
ccggcctaggaggcc

SEQ ID NO: 41864 - DNA, 15 bp, Homo sapiens
cggcctaggaggcca

SEQ ID NO: 41865 - DNA, 15 bp, Homo sapiens
ggcctaggaggccag

SEQ ID NO: 41866 - DNA, 15 bp, Homo sapiens
gcctaggaggccagc

SEQ ID NO: 41867 - DNA, 15 bp, Homo sapiens
cctaggaggccagcg

SEQ ID NO: 41868 - DNA, 15 bp, Homo sapiens
ctaggaggccagcgt

SEQ ID NO: 41869 - DNA, 15 bp, Homo sapiens
taggaggccagcgtt

SEQ ID NO: 41870 - DNA, 15 bp, Homo sapiens
aggaggccagcgttc

SEQ ID NO: 41871 - DNA, 15 bp, Homo sapiens
ggaggccagcgttct

SEQ ID NO: 41872 - DNA, 15 bp, Homo sapiens
gaggccagcgttctc

SEQ ID NO: 41873 - DNA, 15 bp, Homo sapiens
aggccagcgttctcc

SEQ ID NO: 41874 - DNA, 15 bp, Homo sapiens
ggccagcgttctcct

SEQ ID NO: 41875 - DNA, 15 bp, Homo sapiens
gccagcgttctcctg

SEQ ID NO: 41876 - DNA, 15 bp, Homo sapiens
ccagcgttctcctgg

SEQ ID NO: 41877 - DNA, 15 bp, Homo sapiens
cagcgttctcctggc

SEQ ID NO: 41878 - DNA, 15 bp, Homo sapiens
agcgttctcctggcg

SEQ ID NO: 41879 - DNA, 15 bp, Homo sapiens
gcgttctcctggcgg

SEQ ID NO: 41880 - DNA, 15 bp, Homo sapiens
cgttctcctggcgga

SEQ ID NO: 41881 - DNA, 15 bp, Homo sapiens
gttctcctggcggag

SEQ ID NO: 41882 - DNA, 15 bp, Homo sapiens
ttctcctggcggagg

SEQ ID NO: 41883 - DNA, 15 bp, Homo sapiens
tctcctggcggaggg

SEQ ID NO: 41884 - DNA, 15 bp, Homo sapiens
ctcctggcggagggc

SEQ ID NO: 41885 - DNA, 15 bp, Homo sapiens
tcctggcggagggct

SEQ ID NO: 41886 - DNA, 15 bp, Homo sapiens
cctggcggagggctc

SEQ ID NO: 41887 - DNA, 15 bp, Homo sapiens
ctggcggagggctcg

SEQ ID NO: 41888 - DNA, 15 bp, Homo sapiens
tggcggagggctcgg

SEQ ID NO: 41889 - DNA, 15 bp, Homo sapiens
ggcggagggctcggt

SEQ ID NO: 41890 - DNA, 15 bp, Homo sapiens
gcggagggctcggta

SEQ ID NO: 41891 - DNA, 15 bp, Homo sapiens
cggagggctcggtag

SEQ ID NO: 41892 - DNA, 15 bp, Homo sapiens
ggagggctcggtagt

SEQ ID NO: 41893 - DNA, 15 bp, Homo sapiens
gagggctcggtagtc

SEQ ID NO: 41894 - DNA, 15 bp, Homo sapiens
agggctcggtagtcc

SEQ ID NO: 41895 - DNA, 15 bp, Homo sapiens
gggctcggtagtcct

SEQ ID NO: 41896 - DNA, 15 bp, Homo sapiens
ggctcggtagtcctc

SEQ ID NO: 41897 - DNA, 15 bp, Homo sapiens
gctcggtagtcctcc

SEQ ID NO: 41898 - DNA, 15 bp, Homo sapiens
ctcggtagtcctccc

SEQ ID NO: 41899 - DNA, 15 bp, Homo sapiens
tcggtagtcctcccg

SEQ ID NO: 41900 - DNA, 15 bp, Homo sapiens
cggtagtcctcccgg

SEQ ID NO: 41901 - DNA, 15 bp, Homo sapiens
ggtagtcctcccgga

SEQ ID NO: 41902 - DNA, 15 bp, Homo sapiens
gtagtcctcccggat

SEQ ID NO: 41903 - DNA, 15 bp, Homo sapiens
tagtcctcccggatc

SEQ ID NO: 41904 - DNA, 15 bp, Homo sapiens
agtcctcccggatct

SEQ ID NO: 41905 - DNA, 15 bp, Homo sapiens
gtcctcccggatctt

SEQ ID NO: 41906 - DNA, 15 bp, Homo sapiens
tcctcccggatcttc

SEQ ID NO: 41907 - DNA, 15 bp, Homo sapiens
cctcccggatcttct

SEQ ID NO: 41908 - DNA, 15 bp, Homo sapiens
ctcccggatcttctc

SEQ ID NO: 41909 - DNA, 15 bp, Homo sapiens
tcccggatcttctcc

SEQ ID NO: 41910 - DNA, 15 bp, Homo sapiens
cccggatcttctcca

SEQ ID NO: 41911 - DNA, 15 bp, Homo sapiens
ccggatcttctccag

SEQ ID NO: 41912 - DNA, 15 bp, Homo sapiens
cggatcttctccagg

SEQ ID NO: 41913 - DNA, 15 bp, Homo sapiens
ggatcttctccaggt

SEQ ID NO: 41914 - DNA, 15 bp, Homo sapiens
gatcttctccaggtt

SEQ ID NO: 41915 - DNA, 15 bp, Homo sapiens
atcttctccaggttg

SEQ ID NO: 41916 - DNA, 15 bp, Homo sapiens
tcttctccaggttgc

SEQ ID NO: 41917 - DNA, 15 bp, Homo sapiens
cttctccaggttgct

SEQ ID NO: 41918 - DNA, 15 bp, Homo sapiens
ttctccaggttgctg

SEQ ID NO: 41919 - DNA, 15 bp, Homo sapiens
tctccaggttgctga

SEQ ID NO: 41920 - DNA, 15 bp, Homo sapiens
ctccaggttgctgag

SEQ ID NO: 41921 - DNA, 15 bp, Homo sapiens
tccaggttgctgagg

SEQ ID NO: 41922 - DNA, 15 bp, Homo sapiens
ccaggttgctgaggg

SEQ ID NO: 41923 - DNA, 15 bp, Homo sapiens
caggttgctgagggt

SEQ ID NO: 41924 - DNA, 15 bp, Homo sapiens
aggttgctgagggtc

SEQ ID NO: 41925 - DNA, 15 bp, Homo sapiens
ggttgctgagggtct

SEQ ID NO: 41926 - DNA, 15 bp, Homo sapiens
gttgctgagggtctt

SEQ ID NO: 41927 - DNA, 15 bp, Homo sapiens
ttgctgagggtcttc

SEQ ID NO: 41928 - DNA, 15 bp, Homo sapiens
tgctgagggtcttct

SEQ ID NO: 41929 - DNA, 15 bp, Homo sapiens
gctgagggtcttctt

SEQ ID NO: 41930 - DNA, 15 bp, Homo sapiens
ctgagggtcttcttg

SEQ ID NO: 41931 - DNA, 15 bp, Homo sapiens
tgagggtcttcttgc

SEQ ID NO: 41932 - DNA, 15 bp, Homo sapiens
gagggtcttcttgcc

SEQ ID NO: 41933 - DNA, 15 bp, Homo sapiens
agggtcttcttgccc

SEQ ID NO: 41934 - DNA, 15 bp, Homo sapiens
gggtcttcttgccca

SEQ ID NO: 41935 - DNA, 15 bp, Homo sapiens
ggtcttcttgcccag

SEQ ID NO: 41936 - DNA, 15 bp, Homo sapiens
gtcttcttgcccagc

SEQ ID NO: 41937 - DNA, 15 bp, Homo sapiens
tcttcttgcccagct

SEQ ID NO: 41938 - DNA, 15 bp, Homo sapiens
cttcttgcccagctc

SEQ ID NO: 41939 - DNA, 15 bp, Homo sapiens
ttcttgcccagctct

SEQ ID NO: 41940 - DNA, 15 bp, Homo sapiens
tcttgcccagctctg

SEQ ID NO: 41941 - DNA, 15 bp, Homo sapiens
cttgcccagctctgt

SEQ ID NO: 41942 - DNA, 15 bp, Homo sapiens
ttgcccagctctgtc

SEQ ID NO: 41943 - DNA, 15 bp, Homo sapiens
tgcccagctctgtct

SEQ ID NO: 41944 - DNA, 15 bp, Homo sapiens
gcccagctctgtctc

SEQ ID NO: 41945 - DNA, 15 bp, Homo sapiens
cccagctctgtctcg

SEQ ID NO: 41946 - DNA, 15 bp, Homo sapiens
ccagctctgtctcga

SEQ ID NO: 41947 - DNA, 15 bp, Homo sapiens
cagctctgtctcgat

SEQ ID NO: 41948 - DNA, 15 bp, Homo sapiens
agctctgtctcgatc

SEQ ID NO: 41949 - DNA, 15 bp, Homo sapiens
gctctgtctcgatct

SEQ ID NO: 41950 - DNA, 15 bp, Homo sapiens
ctctgtctcgatctg

SEQ ID NO: 41951 - DNA, 15 bp, Homo sapiens
tctgtctcgatctga

SEQ ID NO: 41952 - DNA, 15 bp, Homo sapiens
ctgtctcgatctgag

SEQ ID NO: 41953 - DNA, 15 bp, Homo sapiens
tgtctcgatctgagg

SEQ ID NO: 41954 - DNA, 15 bp, Homo sapiens
gtctcgatctgaggc

SEQ ID NO: 41955 - DNA, 15 bp, Homo sapiens
tctcgatctgaggca

SEQ ID NO: 41956 - DNA, 15 bp, Homo sapiens
ctcgatctgaggcaa

SEQ ID NO: 41957 - DNA, 15 bp, Homo sapiens
tcgatctgaggcaat

SEQ ID NO: 41958 - DNA, 15 bp, Homo sapiens
cgatctgaggcaatg

SEQ ID NO: 41959 - DNA, 15 bp, Homo sapiens
gatctgaggcaatgt

SEQ ID NO: 41960 - DNA, 15 bp, Homo sapiens
atctgaggcaatgtg

SEQ ID NO: 41961 - DNA, 15 bp, Homo sapiens
tctgaggcaatgtga

SEQ ID NO: 41962 - DNA, 15 bp, Homo sapiens
ctgaggcaatgtgaa

SEQ ID NO: 41963 - DNA, 15 bp, Homo sapiens
tgaggcaatgtgaac

SEQ ID NO: 41964 - DNA, 15 bp, Homo sapiens
gaggcaatgtgaaca

SEQ ID NO: 41965 - DNA, 15 bp, Homo sapiens
aggcaatgtgaacac

SEQ ID NO: 41966 - DNA, 15 bp, Homo sapiens
ggcaatgtgaacaca

SEQ ID NO: 41967 - DNA, 15 bp, Homo sapiens
gcaatgtgaacacat

SEQ ID NO: 41968 - DNA, 15 bp, Homo sapiens
caatgtgaacacatg

SEQ ID NO: 41969 - DNA, 15 bp, Homo sapiens
aatgtgaacacatgc

SEQ ID NO: 41970 - DNA, 15 bp, Homo sapiens
atgtgaacacatgcc

SEQ ID NO: 41971 - DNA, 15 bp, Homo sapiens
tgtgaacacatgccc

SEQ ID NO: 41972 - DNA, 15 bp, Homo sapiens
gtgaacacatgcccc

SEQ ID NO: 41973 - DNA, 15 bp, Homo sapiens
tgaacacatgccccc

SEQ ID NO: 41974 - DNA, 15 bp, Homo sapiens
gaacacatgccccct

SEQ ID NO: 41975 - DNA, 15 bp, Homo sapiens
aacacatgccccctc

SEQ ID NO: 41976 - DNA, 15 bp, Homo sapiens
acacatgccccctca

SEQ ID NO: 41977 - DNA, 15 bp, Homo sapiens
cacatgccccctcag

SEQ ID NO: 41978 - DNA, 15 bp, Homo sapiens
acatgccccctcagc

SEQ ID NO: 41979 - DNA, 15 bp, Homo sapiens
catgccccctcagca

SEQ ID NO: 41980 - DNA, 15 bp, Homo sapiens
atgccccctcagcac

SEQ ID NO: 41981 - DNA, 15 bp, Homo sapiens
tgccccctcagcaca

SEQ ID NO: 41982 - DNA, 15 bp, Homo sapiens
gccccctcagcacac

SEQ ID NO: 41983 - DNA, 15 bp, Homo sapiens
ccccctcagcacaca

SEQ ID NO: 41984 - DNA, 15 bp, Homo sapiens
cccctcagcacacac

SEQ ID NO: 41985 - DNA, 15 bp, Homo sapiens
ccctcagcacacaca

SEQ ID NO: 41986 - DNA, 15 bp, Homo sapiens
cctcagcacacacag

SEQ ID NO: 41987 - DNA, 15 bp, Homo sapiens
ctcagcacacacagc

SEQ ID NO: 41988 - DNA, 15 bp, Homo sapiens
tcagcacacacagcc

SEQ ID NO: 41989 - DNA, 15 bp, Homo sapiens
cagcacacacagccc

SEQ ID NO: 41990 - DNA, 15 bp, Homo sapiens
agcacacacagcccc

SEQ ID NO: 41991 - DNA, 15 bp, Homo sapiens
gcacacacagcccct

SEQ ID NO: 41992 - DNA, 15 bp, Homo sapiens
cacacacagcccctt

SEQ ID NO: 41993 - DNA, 15 bp, Homo sapiens
acacacagccccttt

SEQ ID NO: 41994 - DNA, 15 bp, Homo sapiens
cacacagcccctttc

SEQ ID NO: 41995 - DNA, 15 bp, Homo sapiens
acacagcccctttcc

SEQ ID NO: 41996 - DNA, 15 bp, Homo sapiens
cacagcccctttccc

SEQ ID NO: 41997 - DNA, 15 bp, Homo sapiens
acagcccctttccca

SEQ ID NO: 41998 - DNA, 15 bp, Homo sapiens
cagcccctttcccag

SEQ ID NO: 41999 - DNA, 15 bp, Homo sapiens
agcccctttcccagc

SEQ ID NO: 42000 - DNA, 15 bp, Homo sapiens
gcccctttcccagct

SEQ ID NO: 42001 - DNA, 15 bp, Homo sapiens
cccctttcccagctc

SEQ ID NO: 42002 - DNA, 15 bp, Homo sapiens
ccctttcccagctcc

SEQ ID NO: 42003 - DNA, 15 bp, Homo sapiens
cctttcccagctcct

SEQ ID NO: 42004 - DNA, 15 bp, Homo sapiens
ctttcccagctcctg

SEQ ID NO: 42005 - DNA, 15 bp, Homo sapiens
tttcccagctcctgc

SEQ ID NO: 42006 - DNA, 15 bp, Homo sapiens
ttcccagctcctgct

SEQ ID NO: 42007 - DNA, 15 bp, Homo sapiens
tcccagctcctgctc

SEQ ID NO: 42008 - DNA, 15 bp, Homo sapiens
cccagctcctgctca

SEQ ID NO: 42009 - DNA, 15 bp, Homo sapiens
ccagctcctgctcac

SEQ ID NO: 42010 - DNA, 15 bp, Homo sapiens
cagctcctgctcacc

SEQ ID NO: 42011 - DNA, 15 bp, Homo sapiens
agctcctgctcacca

SEQ ID NO: 42012 - DNA, 15 bp, Homo sapiens
gctcctgctcaccag

SEQ ID NO: 42013 - DNA, 15 bp, Homo sapiens
ctcctgctcaccagc

SEQ ID NO: 42014 - DNA, 15 bp, Homo sapiens
tcctgctcaccagcc

SEQ ID NO: 42015 - DNA, 15 bp, Homo sapiens
cctgctcaccagccc

SEQ ID NO: 42016 - DNA, 15 bp, Homo sapiens
ctgctcaccagcccc

SEQ ID NO: 42017 - DNA, 15 bp, Homo sapiens
tgctcaccagccccc

SEQ ID NO: 42018 - DNA, 15 bp, Homo sapiens
gctcaccagccccca

SEQ ID NO: 42019 - DNA, 15 bp, Homo sapiens
ctcaccagcccccat

SEQ ID NO: 42020 - DNA, 15 bp, Homo sapiens
tcaccagcccccatc

SEQ ID NO: 42021 - DNA, 15 bp, Homo sapiens
caccagcccccatca

SEQ ID NO: 42022 - DNA, 15 bp, Homo sapiens
accagcccccatcac

SEQ ID NO: 42023 - DNA, 15 bp, Homo sapiens
ccagcccccatcaca

SEQ ID NO: 42024 - DNA, 15 bp, Homo sapiens
cagcccccatcacag

SEQ ID NO: 42025 - DNA, 15 bp, Homo sapiens
agcccccatcacagc

SEQ ID NO: 42026 - DNA, 15 bp, Homo sapiens
gcccccatcacagcc

SEQ ID NO: 42027 - DNA, 15 bp, Homo sapiens
cccccatcacagcca

SEQ ID NO: 42028 - DNA, 15 bp, Homo sapiens
ccccatcacagccac

SEQ ID NO: 42029 - DNA, 15 bp, Homo sapiens
cccatcacagccact

SEQ ID NO: 42030 - DNA, 15 bp, Homo sapiens
ccatcacagccactc

SEQ ID NO: 42031 - DNA, 15 bp, Homo sapiens
catcacagccactct

SEQ ID NO: 42032 - DNA, 15 bp, Homo sapiens
atcacagccactctg

SEQ ID NO: 42033 - DNA, 15 bp, Homo sapiens
tcacagccactctgg

SEQ ID NO: 42034 - DNA, 15 bp, Homo sapiens
cacagccactctggg

SEQ ID NO: 42035 - DNA, 15 bp, Homo sapiens
acagccactctgggc

SEQ ID NO: 42036 - DNA, 15 bp, Homo sapiens
cagccactctgggcc

SEQ ID NO: 42037 - DNA, 15 bp, Homo sapiens
agccactctgggccc

SEQ ID NO: 42038 - DNA, 15 bp, Homo sapiens
gccactctgggcccc

SEQ ID NO: 42039 - DNA, 15 bp, Homo sapiens
ccactctgggcccct

SEQ ID NO: 42040 - DNA, 15 bp, Homo sapiens
cactctgggcccctc

SEQ ID NO: 42041 - DNA, 15 bp, Homo sapiens
actctgggcccctcc

SEQ ID NO: 42042 - DNA, 15 bp, Homo sapiens
ctctgggcccctccc

SEQ ID NO: 42043 - DNA, 15 bp, Homo sapiens
tctgggcccctccca

SEQ ID NO: 42044 - DNA, 15 bp, Homo sapiens
ctgggcccctcccac

SEQ ID NO: 42045 - DNA, 15 bp, Homo sapiens
tgggcccctcccacc

SEQ ID NO: 42046 - DNA, 15 bp, Homo sapiens
gggcccctcccacca

SEQ ID NO: 42047 - DNA, 15 bp, Homo sapiens
ggcccctcccaccaa

SEQ ID NO: 42048 - DNA, 15 bp, Homo sapiens
gcccctcccaccaac

SEQ ID NO: 42049 - DNA, 15 bp, Homo sapiens
cccctcccaccaact

SEQ ID NO: 42050 - DNA, 15 bp, Homo sapiens
ccctcccaccaactc

SEQ ID NO: 42051 - DNA, 15 bp, Homo sapiens
cctcccaccaactcc

SEQ ID NO: 42052 - DNA, 15 bp, Homo sapiens
ctcccaccaactcca

SEQ ID NO: 42053 - DNA, 15 bp, Homo sapiens
tcccaccaactccaa

SEQ ID NO: 42054 - DNA, 15 bp, Homo sapiens
cccaccaactccaac

SEQ ID NO: 42055 - DNA, 15 bp, Homo sapiens
ccaccaactccaaca

SEQ ID NO: 42056 - DNA, 15 bp, Homo sapiens
caccaactccaacag

SEQ ID NO: 42057 - DNA, 15 bp, Homo sapiens
accaactccaacagc

SEQ ID NO: 42058 - DNA, 15 bp, Homo sapiens
ccaactccaacagcc

SEQ ID NO: 42059 - DNA, 15 bp, Homo sapiens
caactccaacagcct

SEQ ID NO: 42060 - DNA, 15 bp, Homo sapiens
aactccaacagcctg

SEQ ID NO: 42061 - DNA, 15 bp, Homo sapiens
actccaacagcctgc

SEQ ID NO: 42062 - DNA, 15 bp, Homo sapiens
ctccaacagcctgct

SEQ ID NO: 42063 - DNA, 15 bp, Homo sapiens
tccaacagcctgctc

SEQ ID NO: 42064 - DNA, 15 bp, Homo sapiens
ccaacagcctgctct

SEQ ID NO: 42065 - DNA, 15 bp, Homo sapiens
caacagcctgctctg

SEQ ID NO: 42066 - DNA, 15 bp, Homo sapiens
aacagcctgctctgt

SEQ ID NO: 42067 - DNA, 15 bp, Homo sapiens
acagcctgctctgtc

SEQ ID NO: 42068 - DNA, 15 bp, Homo sapiens
cagcctgctctgtcc

SEQ ID NO: 42069 - DNA, 15 bp, Homo sapiens
agcctgctctgtccc

SEQ ID NO: 42070 - DNA, 15 bp, Homo sapiens
gcctgctctgtccca

SEQ ID NO: 42071 - DNA, 15 bp, Homo sapiens
cctgctctgtcccat

SEQ ID NO: 42072 - DNA, 15 bp, Homo sapiens
ctgctctgtcccatg

SEQ ID NO: 42073 - DNA, 15 bp, Homo sapiens
tgctctgtcccatgg

SEQ ID NO: 42074 - DNA, 15 bp, Homo sapiens
gctctgtcccatggc

SEQ ID NO: 42075 - DNA, 15 bp, Homo sapiens
ctctgtcccatggcc

SEQ ID NO: 42076 - DNA, 15 bp, Homo sapiens
tctgtcccatggcca

SEQ ID NO: 42077 - DNA, 15 bp, Homo sapiens
ctgtcccatggccag

SEQ ID NO: 42078 - DNA, 15 bp, Homo sapiens
tgtcccatggccagg

SEQ ID NO: 42079 - DNA, 15 bp, Homo sapiens
gtcccatggccaggc

SEQ ID NO: 42080 - DNA, 15 bp, Homo sapiens
tcccatggccaggcc

SEQ ID NO: 42081 - DNA, 15 bp, Homo sapiens
cccatggccaggcct

SEQ ID NO: 42082 - DNA, 15 bp, Homo sapiens
ccatggccaggcctc

SEQ ID NO: 42083 - DNA, 15 bp, Homo sapiens
catggccaggcctcg

SEQ ID NO: 42084 - DNA, 15 bp, Homo sapiens
atggccaggcctcgt

SEQ ID NO: 42085 - DNA, 15 bp, Homo sapiens
tggccaggcctcgtg

SEQ ID NO: 42086 - DNA, 15 bp, Homo sapiens
ggccaggcctcgtgt

SEQ ID NO: 42087 - DNA, 15 bp, Homo sapiens
gccaggcctcgtgtg

SEQ ID NO: 42088 - DNA, 15 bp, Homo sapiens
ccaggcctcgtgtgg

SEQ ID NO: 42089 - DNA, 15 bp, Homo sapiens
caggcctcgtgtggt

SEQ ID NO: 42090 - DNA, 15 bp, Homo sapiens
aggcctcgtgtggtg

SEQ ID NO: 42091 - DNA, 15 bp, Homo sapiens
ggcctcgtgtggtgt

SEQ ID NO: 42092 - DNA, 15 bp, Homo sapiens
gcctcgtgtggtgtt

SEQ ID NO: 42093 - DNA, 15 bp, Homo sapiens
cctcgtgtggtgttc

SEQ ID NO: 42094 - DNA, 15 bp, Homo sapiens
ctcgtgtggtgttcc

SEQ ID NO: 42095 - DNA, 15 bp, Homo sapiens
tcgtgtggtgttccc

SEQ ID NO: 42096 - DNA, 15 bp, Homo sapiens
cgtgtggtgttccct

SEQ ID NO: 42097 - DNA, 15 bp, Homo sapiens
gtgtggtgttccctc

SEQ ID NO: 42098 - DNA, 15 bp, Homo sapiens
tgtggtgttccctct

SEQ ID NO: 42099 - DNA, 15 bp, Homo sapiens
gtggtgttccctcta

SEQ ID NO: 42100 - DNA, 15 bp, Homo sapiens
tggtgttccctctac

SEQ ID NO: 42101 - DNA, 15 bp, Homo sapiens
ggtgttccctctacc

SEQ ID NO: 42102 - DNA, 15 bp, Homo sapiens
gtgttccctctaccc

SEQ ID NO: 42103 - DNA, 15 bp, Homo sapiens
tgttccctctaccca

SEQ ID NO: 42104 - DNA, 15 bp, Homo sapiens
gttccctctacccaa

SEQ ID NO: 42105 - DNA, 15 bp, Homo sapiens
ttccctctacccaaa

SEQ ID NO: 42106 - DNA, 15 bp, Homo sapiens
tccctctacccaaag

SEQ ID NO: 42107 - DNA, 15 bp, Homo sapiens
ccctctacccaaagc

SEQ ID NO: 42108 - DNA, 15 bp, Homo sapiens
cctctacccaaagca

SEQ ID NO: 42109 - DNA, 15 bp, Homo sapiens
ctctacccaaagcat

SEQ ID NO: 42110 - DNA, 15 bp, Homo sapiens
tctacccaaagcatc

SEQ ID NO: 42111 - DNA, 15 bp, Homo sapiens
ctacccaaagcatcc

SEQ ID NO: 42112 - DNA, 15 bp, Homo sapiens
tacccaaagcatcct

SEQ ID NO: 42113 - DNA, 15 bp, Homo sapiens
acccaaagcatcctt

SEQ ID NO: 42114 - DNA, 15 bp, Homo sapiens
cccaaagcatccttc

SEQ ID NO: 42115 - DNA, 15 bp, Homo sapiens
ccaaagcatccttcg

SEQ ID NO: 42116 - DNA, 15 bp, Homo sapiens
caaagcatccttcgc

SEQ ID NO: 42117 - DNA, 15 bp, Homo sapiens
aaagcatccttcgcc

SEQ ID NO: 42118 - DNA, 15 bp, Homo sapiens
aagcatccttcgcca

SEQ ID NO: 42119 - DNA, 15 bp, Homo sapiens
agcatccttcgccat

SEQ ID NO: 42120 - DNA, 15 bp, Homo sapiens
gcatccttcgccatg

SEQ ID NO: 42121 - DNA, 15 bp, Homo sapiens
catccttcgccatgt

SEQ ID NO: 42122 - DNA, 15 bp, Homo sapiens
atccttcgccatgtg

SEQ ID NO: 42123 - DNA, 15 bp, Homo sapiens
tccttcgccatgtgg

SEQ ID NO: 42124 - DNA, 15 bp, Homo sapiens
ccttcgccatgtggc

SEQ ID NO: 42125 - DNA, 15 bp, Homo sapiens
cttcgccatgtggca

SEQ ID NO: 42126 - DNA, 15 bp, Homo sapiens
ttcgccatgtggcag

SEQ ID NO: 42127 - DNA, 15 bp, Homo sapiens
tcgccatgtggcagg

SEQ ID NO: 42128 - DNA, 15 bp, Homo sapiens
cgccatgtggcagga

SEQ ID NO: 42129 - DNA, 15 bp, Homo sapiens
gccatgtggcaggat

SEQ ID NO: 42130 - DNA, 15 bp, Homo sapiens
ccatgtggcaggatt

SEQ ID NO: 42131 - DNA, 15 bp, Homo sapiens
catgtggcaggattc

SEQ ID NO: 42132 - DNA, 15 bp, Homo sapiens
atgtggcaggattcc

SEQ ID NO: 42133 - DNA, 15 bp, Homo sapiens
tgtggcaggattccc

SEQ ID NO: 42134 - DNA, 15 bp, Homo sapiens
gtggcaggattcccc

SEQ ID NO: 42135 - DNA, 15 bp, Homo sapiens
tggcaggattccccc

SEQ ID NO: 42136 - DNA, 15 bp, Homo sapiens
ggcaggattccccct

SEQ ID NO: 42137 - DNA, 15 bp, Homo sapiens
gcaggattcccccta

SEQ ID NO: 42138 - DNA, 15 bp, Homo sapiens
caggattccccctac

SEQ ID NO: 42139 - DNA, 15 bp, Homo sapiens
aggattccccctaca

SEQ ID NO: 42140 - DNA, 15 bp, Homo sapiens
ggattccccctacat

SEQ ID NO: 42141 - DNA, 15 bp, Homo sapiens
gattccccctacatc

SEQ ID NO: 42142 - DNA, 15 bp, Homo sapiens
attccccctacatct

SEQ ID NO: 42143 - DNA, 15 bp, Homo sapiens
ttccccctacatctt

SEQ ID NO: 42144 - DNA, 15 bp, Homo sapiens
tccccctacatcttt

SEQ ID NO: 42145 - DNA, 15 bp, Homo sapiens
ccccctacatcttta

SEQ ID NO: 42146 - DNA, 15 bp, Homo sapiens
cccctacatctttaa

SEQ ID NO: 42147 - DNA, 15 bp, Homo sapiens
ccctacatctttaag

SEQ ID NO: 42148 - DNA, 15 bp, Homo sapiens
cctacatctttaagc

SEQ ID NO: 42149 - DNA, 15 bp, Homo sapiens
ctacatctttaagct

SEQ ID NO: 42150 - DNA, 15 bp, Homo sapiens
tacatctttaagctg

SEQ ID NO: 42151 - DNA, 15 bp, Homo sapiens
acatctttaagctga

SEQ ID NO: 42152 - DNA, 15 bp, Homo sapiens
catctttaagctgaa

SEQ ID NO: 42153 - DNA, 15 bp, Homo sapiens
atctttaagctgaag

SEQ ID NO: 42154 - DNA, 15 bp, Homo sapiens
tctttaagctgaagc

SEQ ID NO: 42155 - DNA, 15 bp, Homo sapiens
ctttaagctgaagcc

SEQ ID NO: 42156 - DNA, 15 bp, Homo sapiens
tttaagctgaagcct

SEQ ID NO: 42157 - DNA, 15 bp, Homo sapiens
ttaagctgaagcctc

SEQ ID NO: 42158 - DNA, 15 bp, Homo sapiens
taagctgaagcctct

SEQ ID NO: 42159 - DNA, 15 bp, Homo sapiens
aagctgaagcctctg

SEQ ID NO: 42160 - DNA, 15 bp, Homo sapiens
agctgaagcctctgc

SEQ ID NO: 42161 - DNA, 15 bp, Homo sapiens
gctgaagcctctgcc

SEQ ID NO: 42162 - DNA, 15 bp, Homo sapiens
ctgaagcctctgccc

SEQ ID NO: 42163 - DNA, 15 bp, Homo sapiens
tgaagcctctgccca

SEQ ID NO: 42164 - DNA, 15 bp, Homo sapiens
gaagcctctgcccat

SEQ ID NO: 42165 - DNA, 15 bp, Homo sapiens
aagcctctgcccatg

SEQ ID NO: 42166 - DNA, 15 bp, Homo sapiens
agcctctgcccatgg

SEQ ID NO: 42167 - DNA, 15 bp, Homo sapiens
gcctctgcccatggc

SEQ ID NO: 42168 - DNA, 15 bp, Homo sapiens
cctctgcccatggcc

SEQ ID NO: 42169 - DNA, 15 bp, Homo sapiens
ctctgcccatggccc

SEQ ID NO: 42170 - DNA, 15 bp, Homo sapiens
tctgcccatggccct

SEQ ID NO: 42171 - DNA, 15 bp, Homo sapiens
ctgcccatggccctg

SEQ ID NO: 42172 - DNA, 15 bp, Homo sapiens
tgcccatggccctgg

SEQ ID NO: 42173 - DNA, 15 bp, Homo sapiens
gcccatggccctggg

SEQ ID NO: 42174 - DNA, 15 bp, Homo sapiens
cccatggccctggga

SEQ ID NO: 42175 - DNA, 15 bp, Homo sapiens
ccatggccctgggag

SEQ ID NO: 42176 - DNA, 15 bp, Homo sapiens
catggccctgggagg

SEQ ID NO: 42177 - DNA, 15 bp, Homo sapiens
atggccctgggaggc

SEQ ID NO: 42178 - DNA, 15 bp, Homo sapiens
tggccctgggaggca

SEQ ID NO: 42179 - DNA, 15 bp, Homo sapiens
ggccctgggaggcag

SEQ ID NO: 42180 - DNA, 15 bp, Homo sapiens
gccctgggaggcaga

SEQ ID NO: 42181 - DNA, 15 bp, Homo sapiens
ccctgggaggcagac

SEQ ID NO: 42182 - DNA, 15 bp, Homo sapiens
cctgggaggcagaca

SEQ ID NO: 42183 - DNA, 15 bp, Homo sapiens
ctgggaggcagacag

SEQ ID NO: 42184 - DNA, 15 bp, Homo sapiens
tgggaggcagacagg

SEQ ID NO: 42185 - DNA, 15 bp, Homo sapiens
gggaggcagacagga

SEQ ID NO: 42186 - DNA, 15 bp, Homo sapiens
ggaggcagacaggag

SEQ ID NO: 42187 - DNA, 15 bp, Homo sapiens
gaggcagacaggagg

SEQ ID NO: 42188 - DNA, 15 bp, Homo sapiens
aggcagacaggaggg

SEQ ID NO: 42189 - DNA, 15 bp, Homo sapiens
ggcagacaggagggc

SEQ ID NO: 42190 - DNA, 15 bp, Homo sapiens
gcagacaggagggcc

SEQ ID NO: 42191 - DNA, 15 bp, Homo sapiens
cagacaggagggccc

SEQ ID NO: 42192 - DNA, 15 bp, Homo sapiens
agacaggagggccct

SEQ ID NO: 42193 - DNA, 15 bp, Homo sapiens
gacaggagggccctt

SEQ ID NO: 42194 - DNA, 15 bp, Homo sapiens
acaggagggcccttg

SEQ ID NO: 42195 - DNA, 15 bp, Homo sapiens
caggagggcccttgg

SEQ ID NO: 42196 - DNA, 15 bp, Homo sapiens
aggagggcccttggg

SEQ ID NO: 42197 - DNA, 15 bp, Homo sapiens
ggagggcccttgggg

SEQ ID NO: 42198 - DNA, 15 bp, Homo sapiens
gagggcccttggggt

SEQ ID NO: 42199 - DNA, 15 bp, Homo sapiens
agggcccttggggtg

SEQ ID NO: 42200 - DNA, 15 bp, Homo sapiens
gggcccttggggtgg

SEQ ID NO: 42201 - DNA, 15 bp, Homo sapiens
ggcccttggggtgga

SEQ ID NO: 42202 - DNA, 15 bp, Homo sapiens
gcccttggggtggaa

SEQ ID NO: 42203 - DNA, 15 bp, Homo sapiens
cccttggggtggaag

SEQ ID NO: 42204 - DNA, 15 bp, Homo sapiens
ccttggggtggaagc

SEQ ID NO: 42205 - DNA, 15 bp, Homo sapiens
cttggggtggaagct

SEQ ID NO: 42206 - DNA, 15 bp, Homo sapiens
ttggggtggaagctg

SEQ ID NO: 42207 - DNA, 15 bp, Homo sapiens
tggggtggaagctgg

SEQ ID NO: 42208 - DNA, 15 bp, Homo sapiens
ggggtggaagctggg

SEQ ID NO: 42209 - DNA, 15 bp, Homo sapiens
gggtggaagctgggg

SEQ ID NO: 42210 - DNA, 15 bp, Homo sapiens
ggtggaagctggggc

SEQ ID NO: 42211 - DNA, 15 bp, Homo sapiens
gtggaagctggggct

SEQ ID NO: 42212 - DNA, 15 bp, Homo sapiens
tggaagctggggctc

SEQ ID NO: 42213 - DNA, 15 bp, Homo sapiens
ggaagctggggctca

SEQ ID NO: 42214 - DNA, 15 bp, Homo sapiens
gaagctggggctcac

SEQ ID NO: 42215 - DNA, 15 bp, Homo sapiens
aagctggggctcaca

SEQ ID NO: 42216 - DNA, 15 bp, Homo sapiens
agctggggctcacag

SEQ ID NO: 42217 - DNA, 15 bp, Homo sapiens
gctggggctcacagt

SEQ ID NO: 42218 - DNA, 15 bp, Homo sapiens
ctggggctcacagta

SEQ ID NO: 42219 - DNA, 15 bp, Homo sapiens
tggggctcacagtag

SEQ ID NO: 42220 - DNA, 15 bp, Homo sapiens
ggggctcacagtagg

SEQ ID NO: 42221 - DNA, 15 bp, Homo sapiens
gggctcacagtaggc

SEQ ID NO: 42222 - DNA, 15 bp, Homo sapiens
ggctcacagtaggcc

SEQ ID NO: 42223 - DNA, 15 bp, Homo sapiens
gctcacagtaggcca

SEQ ID NO: 42224 - DNA, 15 bp, Homo sapiens
ctcacagtaggccac

SEQ ID NO: 42225 - DNA, 15 bp, Homo sapiens
tcacagtaggccact

SEQ ID NO: 42226 - DNA, 15 bp, Homo sapiens
cacagtaggccactt

SEQ ID NO: 42227 - DNA, 15 bp, Homo sapiens
acagtaggccacttg

SEQ ID NO: 42228 - DNA, 15 bp, Homo sapiens
cagtaggccacttgc

SEQ ID NO: 42229 - DNA, 15 bp, Homo sapiens
agtaggccacttgcc

SEQ ID NO: 42230 - DNA, 15 bp, Homo sapiens
gtaggccacttgcct

SEQ ID NO: 42231 - DNA, 15 bp, Homo sapiens
taggccacttgcctg

SEQ ID NO: 42232 - DNA, 15 bp, Homo sapiens
aggccacttgcctgt

SEQ ID NO: 42233 - DNA, 15 bp, Homo sapiens
ggccacttgcctgtc

SEQ ID NO: 42234 - DNA, 15 bp, Homo sapiens
gccacttgcctgtcc

SEQ ID NO: 42235 - DNA, 15 bp, Homo sapiens
ccacttgcctgtccc

SEQ ID NO: 42236 - DNA, 15 bp, Homo sapiens
cacttgcctgtccca

SEQ ID NO: 42237 - DNA, 15 bp, Homo sapiens
acttgcctgtcccag

SEQ ID NO: 42238 - DNA, 15 bp, Homo sapiens
cttgcctgtcccagg

SEQ ID NO: 42239 - DNA, 15 bp, Homo sapiens
ttgcctgtcccaggt

SEQ ID NO: 42240 - DNA, 15 bp, Homo sapiens
tgcctgtcccaggtc

SEQ ID NO: 42241 - DNA, 15 bp, Homo sapiens
gcctgtcccaggtca

SEQ ID NO: 42242 - DNA, 15 bp, Homo sapiens
cctgtcccaggtcac

SEQ ID NO: 42243 - DNA, 15 bp, Homo sapiens
ctgtcccaggtcaca

SEQ ID NO: 42244 - DNA, 15 bp, Homo sapiens
tgtcccaggtcacag

SEQ ID NO: 42245 - DNA, 15 bp, Homo sapiens
gtcccaggtcacagg

SEQ ID NO: 42246 - DNA, 15 bp, Homo sapiens
tcccaggtcacaggc

SEQ ID NO: 42247 - DNA, 15 bp, Homo sapiens
cccaggtcacaggca

SEQ ID NO: 42248 - DNA, 15 bp, Homo sapiens
ccaggtcacaggcac

SEQ ID NO: 42249 - DNA, 15 bp, Homo sapiens
caggtcacaggcact

SEQ ID NO: 42250 - DNA, 15 bp, Homo sapiens
aggtcacaggcacta

SEQ ID NO: 42251 - DNA, 15 bp, Homo sapiens
ggtcacaggcactaa

SEQ ID NO: 42252 - DNA, 15 bp, Homo sapiens
gtcacaggcactaag

SEQ ID NO: 42253 - DNA, 15 bp, Homo sapiens
tcacaggcactaagg

SEQ ID NO: 42254 - DNA, 15 bp, Homo sapiens
cacaggcactaaggg

SEQ ID NO: 42255 - DNA, 15 bp, Homo sapiens
acaggcactaagggg

SEQ ID NO: 42256 - DNA, 15 bp, Homo sapiens
caggcactaaggggc

SEQ ID NO: 42257 - DNA, 15 bp, Homo sapiens
aggcactaaggggca

SEQ ID NO: 42258 - DNA, 15 bp, Homo sapiens
ggcactaaggggcag

SEQ ID NO: 42259 - DNA, 15 bp, Homo sapiens
gcactaaggggcagg

SEQ ID NO: 42260 - DNA, 15 bp, Homo sapiens
cactaaggggcaggg

SEQ ID NO: 42261 - DNA, 15 bp, Homo sapiens
actaaggggcagggc

SEQ ID NO: 42262 - DNA, 15 bp, Homo sapiens
ctaaggggcagggct

SEQ ID NO: 42263 - DNA, 15 bp, Homo sapiens
taaggggcagggctg

SEQ ID NO: 42264 - DNA, 15 bp, Homo sapiens
aaggggcagggctgg

SEQ ID NO: 42265 - DNA, 15 bp, Homo sapiens
aggggcagggctggg

SEQ ID NO: 42266 - DNA, 15 bp, Homo sapiens
ggggcagggctgggt

SEQ ID NO: 42267 - DNA, 15 bp, Homo sapiens
gggcagggctgggtg

SEQ ID NO: 42268 - DNA, 15 bp, Homo sapiens
ggcagggctgggtgt

SEQ ID NO: 42269 - DNA, 15 bp, Homo sapiens
gcagggctgggtgtc

SEQ ID NO: 42270 - DNA, 15 bp, Homo sapiens
cagggctgggtgtcc

SEQ ID NO: 42271 - DNA, 15 bp, Homo sapiens
agggctgggtgtcca

SEQ ID NO: 42272 - DNA, 15 bp, Homo sapiens
gggctgggtgtccag

SEQ ID NO: 42273 - DNA, 15 bp, Homo sapiens
ggctgggtgtccagc

SEQ ID NO: 42274 - DNA, 15 bp, Homo sapiens
gctgggtgtccagcc

SEQ ID NO: 42275 - DNA, 15 bp, Homo sapiens
ctgggtgtccagcca

SEQ ID NO: 42276 - DNA, 15 bp, Homo sapiens
tgggtgtccagccat

SEQ ID NO: 42277 - DNA, 15 bp, Homo sapiens
gggtgtccagccatc

SEQ ID NO: 42278 - DNA, 15 bp, Homo sapiens
ggtgtccagccatcg

SEQ ID NO: 42279 - DNA, 15 bp, Homo sapiens
gtgtccagccatcgg

SEQ ID NO: 42280 - DNA, 15 bp, Homo sapiens
tgtccagccatcggc

SEQ ID NO: 42281 - DNA, 15 bp, Homo sapiens
gtccagccatcggct

SEQ ID NO: 42282 - DNA, 15 bp, Homo sapiens
tccagccatcggctg

SEQ ID NO: 42283 - DNA, 15 bp, Homo sapiens
ccagccatcggctgt

SEQ ID NO: 42284 - DNA, 15 bp, Homo sapiens
cagccatcggctgtg

SEQ ID NO: 42285 - DNA, 15 bp, Homo sapiens
agccatcggctgtgt

SEQ ID NO: 42286 - DNA, 15 bp, Homo sapiens
gccatcggctgtgtg

SEQ ID NO: 42287 - DNA, 15 bp, Homo sapiens
ccatcggctgtgtgt

SEQ ID NO: 42288 - DNA, 15 bp, Homo sapiens
catcggctgtgtgtg

SEQ ID NO: 42289 - DNA, 15 bp, Homo sapiens
atcggctgtgtgtgg

SEQ ID NO: 42290 - DNA, 15 bp, Homo sapiens
tcggctgtgtgtggc

SEQ ID NO: 42291 - DNA, 15 bp, Homo sapiens
cggctgtgtgtggct

SEQ ID NO: 42292 - DNA, 15 bp, Homo sapiens
ggctgtgtgtggctc

SEQ ID NO: 42293 - DNA, 15 bp, Homo sapiens
gctgtgtgtggctcc

SEQ ID NO: 42294 - DNA, 15 bp, Homo sapiens
ctgtgtgtggctcca

SEQ ID NO: 42295 - DNA, 15 bp, Homo sapiens
tgtgtgtggctccac

SEQ ID NO: 42296 - DNA, 15 bp, Homo sapiens
gtgtgtggctccaca

SEQ ID NO: 42297 - DNA, 15 bp, Homo sapiens
tgtgtggctccacag

SEQ ID NO: 42298 - DNA, 15 bp, Homo sapiens
gtgtggctccacagc

SEQ ID NO: 42299 - DNA, 15 bp, Homo sapiens
tgtggctccacagcc

SEQ ID NO: 42300 - DNA, 15 bp, Homo sapiens
gtggctccacagcct

SEQ ID NO: 42301 - DNA, 15 bp, Homo sapiens
tggctccacagcctc

SEQ ID NO: 42302 - DNA, 15 bp, Homo sapiens
ggctccacagcctct

SEQ ID NO: 42303 - DNA, 15 bp, Homo sapiens
gctccacagcctctg

SEQ ID NO: 42304 - DNA, 15 bp, Homo sapiens
ctccacagcctctgt

SEQ ID NO: 42305 - DNA, 15 bp, Homo sapiens
tccacagcctctgtc

SEQ ID NO: 42306 - DNA, 15 bp, Homo sapiens
ccacagcctctgtca

SEQ ID NO: 42307 - DNA, 15 bp, Homo sapiens
cacagcctctgtcag

SEQ ID NO: 42308 - DNA, 15 bp, Homo sapiens
acagcctctgtcagc

SEQ ID NO: 42309 - DNA, 15 bp, Homo sapiens
cagcctctgtcagca

SEQ ID NO: 42310 - DNA, 15 bp, Homo sapiens
agcctctgtcagcat

SEQ ID NO: 42311 - DNA, 15 bp, Homo sapiens
gcctctgtcagcata

SEQ ID NO: 42312 - DNA, 15 bp, Homo sapiens
cctctgtcagcataa

SEQ ID NO: 42313 - DNA, 15 bp, Homo sapiens
ctctgtcagcataac

SEQ ID NO: 42314 - DNA, 15 bp, Homo sapiens
tctgtcagcataacc

SEQ ID NO: 42315 - DNA, 15 bp, Homo sapiens
ctgtcagcataacct

SEQ ID NO: 42316 - DNA, 15 bp, Homo sapiens
tgtcagcataacctg

SEQ ID NO: 42317 - DNA, 15 bp, Homo sapiens
gtcagcataacctga

SEQ ID NO: 42318 - DNA, 15 bp, Homo sapiens
tcagcataacctgag

SEQ ID NO: 42319 - DNA, 15 bp, Homo sapiens
cagcataacctgagg

SEQ ID NO: 42320 - DNA, 15 bp, Homo sapiens
agcataacctgagga

SEQ ID NO: 42321 - DNA, 15 bp, Homo sapiens
gcataacctgaggaa

SEQ ID NO: 42322 - DNA, 15 bp, Homo sapiens
cataacctgaggaac

SEQ ID NO: 42323 - DNA, 15 bp, Homo sapiens
ataacctgaggaact

SEQ ID NO: 42324 - DNA, 15 bp, Homo sapiens
taacctgaggaactg

SEQ ID NO: 42325 - DNA, 15 bp, Homo sapiens
aacctgaggaactgt

SEQ ID NO: 42326 - DNA, 15 bp, Homo sapiens
acctgaggaactgtc

SEQ ID NO: 42327 - DNA, 15 bp, Homo sapiens
cctgaggaactgtcc

SEQ ID NO: 42328 - DNA, 15 bp, Homo sapiens
ctgaggaactgtccc

SEQ ID NO: 42329 - DNA, 15 bp, Homo sapiens
tgaggaactgtcccc

SEQ ID NO: 42330 - DNA, 15 bp, Homo sapiens
gaggaactgtccccc

SEQ ID NO: 42331 - DNA, 15 bp, Homo sapiens
aggaactgtcccccc

SEQ ID NO: 42332 - DNA, 15 bp, Homo sapiens
ggaactgtccccccg

SEQ ID NO: 42333 - DNA, 15 bp, Homo sapiens
gaactgtccccccgg

SEQ ID NO: 42334 - DNA, 15 bp, Homo sapiens
aactgtccccccggc

SEQ ID NO: 42335 - DNA, 15 bp, Homo sapiens
actgtccccccggcc

SEQ ID NO: 42336 - DNA, 15 bp, Homo sapiens
ctgtccccccggccc

SEQ ID NO: 42337 - DNA, 15 bp, Homo sapiens
tgtccccccggcccg

SEQ ID NO: 42338 - DNA, 15 bp, Homo sapiens
gtccccccggcccgc

SEQ ID NO: 42339 - DNA, 15 bp, Homo sapiens
tccccccggcccgcc

SEQ ID NO: 42340 - DNA, 15 bp, Homo sapiens
ccccccggcccgcct

SEQ ID NO: 42341 - DNA, 15 bp, Homo sapiens
cccccggcccgcctt

SEQ ID NO: 42342 - DNA, 15 bp, Homo sapiens
ccccggcccgccttg

SEQ ID NO: 42343 - DNA, 15 bp, Homo sapiens
cccggcccgccttgg

SEQ ID NO: 42344 - DNA, 15 bp, Homo sapiens
ccggcccgccttggc

SEQ ID NO: 42345 - DNA, 15 bp, Homo sapiens
cggcccgccttggct

SEQ ID NO: 42346 - DNA, 15 bp, Homo sapiens
ggcccgccttggctc

SEQ ID NO: 42347 - DNA, 15 bp, Homo sapiens
gcccgccttggctcc

SEQ ID NO: 42348 - DNA, 15 bp, Homo sapiens
cccgccttggctccc

SEQ ID NO: 42349 - DNA, 15 bp, Homo sapiens
ccgccttggctcccc

SEQ ID NO: 42350 - DNA, 15 bp, Homo sapiens
cgccttggctcccca

SEQ ID NO: 42351 - DNA, 15 bp, Homo sapiens
gccttggctccccat

SEQ ID NO: 42352 - DNA, 15 bp, Homo sapiens
ccttggctccccatc

SEQ ID NO: 42353 - DNA, 15 bp, Homo sapiens
cttggctccccatcc

SEQ ID NO: 42354 - DNA, 15 bp, Homo sapiens
ttggctccccatcct

SEQ ID NO: 42355 - DNA, 15 bp, Homo sapiens
tggctccccatcctg

SEQ ID NO: 42356 - DNA, 15 bp, Homo sapiens
ggctccccatcctgc

SEQ ID NO: 42357 - DNA, 15 bp, Homo sapiens
gctccccatcctgcc

SEQ ID NO: 42358 - DNA, 15 bp, Homo sapiens
ctccccatcctgccc

SEQ ID NO: 42359 - DNA, 15 bp, Homo sapiens
tccccatcctgcccc

SEQ ID NO: 42360 - DNA, 15 bp, Homo sapiens
ccccatcctgccccc

SEQ ID NO: 42361 - DNA, 15 bp, Homo sapiens
cccatcctgccccca

SEQ ID NO: 42362 - DNA, 15 bp, Homo sapiens
ccatcctgcccccag

SEQ ID NO: 42363 - DNA, 15 bp, Homo sapiens
catcctgcccccagg

SEQ ID NO: 42364 - DNA, 15 bp, Homo sapiens
atcctgcccccaggc

SEQ ID NO: 42365 - DNA, 15 bp, Homo sapiens
tcctgcccccaggcc

SEQ ID NO: 42366 - DNA, 15 bp, Homo sapiens
cctgcccccaggcct

SEQ ID NO: 42367 - DNA, 15 bp, Homo sapiens
ctgcccccaggcctc

SEQ ID NO: 42368 - DNA, 15 bp, Homo sapiens
tgcccccaggcctca

SEQ ID NO: 42369 - DNA, 15 bp, Homo sapiens
gcccccaggcctcac

SEQ ID NO: 42370 - DNA, 15 bp, Homo sapiens
cccccaggcctcacc

SEQ ID NO: 42371 - DNA, 15 bp, Homo sapiens
ccccaggcctcacct

SEQ ID NO: 42372 - DNA, 15 bp, Homo sapiens
cccaggcctcacctg

SEQ ID NO: 42373 - DNA, 15 bp, Homo sapiens
ccaggcctcacctgc

SEQ ID NO: 42374 - DNA, 15 bp, Homo sapiens
caggcctcacctgct

SEQ ID NO: 42375 - DNA, 15 bp, Homo sapiens
aggcctcacctgctc

SEQ ID NO: 42376 - DNA, 15 bp, Homo sapiens
ggcctcacctgctcc

SEQ ID NO: 42377 - DNA, 15 bp, Homo sapiens
gcctcacctgctcct

SEQ ID NO: 42378 - DNA, 15 bp, Homo sapiens
cctcacctgctcctc

SEQ ID NO: 42379 - DNA, 15 bp, Homo sapiens
ctcacctgctcctcg

SEQ ID NO: 42380 - DNA, 15 bp, Homo sapiens
tcacctgctcctcga

SEQ ID NO: 42381 - DNA, 15 bp, Homo sapiens
cacctgctcctcgag

SEQ ID NO: 42382 - DNA, 15 bp, Homo sapiens
acctgctcctcgagg

SEQ ID NO: 42383 - DNA, 15 bp, Homo sapiens
cctgctcctcgaggt

SEQ ID NO: 42384 - DNA, 15 bp, Homo sapiens
ctgctcctcgaggtc

SEQ ID NO: 42385 - DNA, 15 bp, Homo sapiens
tgctcctcgaggtct

SEQ ID NO: 42386 - DNA, 15 bp, Homo sapiens
gctcctcgaggtctc

SEQ ID NO: 42387 - DNA, 15 bp, Homo sapiens
ctcctcgaggtctcg

SEQ ID NO: 42388 - DNA, 15 bp, Homo sapiens
tcctcgaggtctcga

SEQ ID NO: 42389 - DNA, 15 bp, Homo sapiens
cctcgaggtctcgaa

SEQ ID NO: 42390 - DNA, 15 bp, Homo sapiens
ctcgaggtctcgaac

SEQ ID NO: 42391 - DNA, 15 bp, Homo sapiens
tcgaggtctcgaacc

SEQ ID NO: 42392 - DNA, 15 bp, Homo sapiens
cgaggtctcgaacct

SEQ ID NO: 42393 - DNA, 15 bp, Homo sapiens
gaggtctcgaacctc

SEQ ID NO: 42394 - DNA, 15 bp, Homo sapiens
aggtctcgaacctcc

SEQ ID NO: 42395 - DNA, 15 bp, Homo sapiens
ggtctcgaacctccc

SEQ ID NO: 42396 - DNA, 15 bp, Homo sapiens
gtctcgaacctcccg

SEQ ID NO: 42397 - DNA, 15 bp, Homo sapiens
tctcgaacctcccgc

SEQ ID NO: 42398 - DNA, 15 bp, Homo sapiens
ctcgaacctcccgca

SEQ ID NO: 42399 - DNA, 15 bp, Homo sapiens
tcgaacctcccgcat

SEQ ID NO: 42400 - DNA, 15 bp, Homo sapiens
cgaacctcccgcatg

SEQ ID NO: 42401 - DNA, 15 bp, Homo sapiens
gaacctcccgcatga

SEQ ID NO: 42402 - DNA, 15 bp, Homo sapiens
aacctcccgcatgat

SEQ ID NO: 42403 - DNA, 15 bp, Homo sapiens
acctcccgcatgatg

SEQ ID NO: 42404 - DNA, 15 bp, Homo sapiens
cctcccgcatgatgg

SEQ ID NO: 42405 - DNA, 15 bp, Homo sapiens
ctcccgcatgatggt

SEQ ID NO: 42406 - DNA, 15 bp, Homo sapiens
tcccgcatgatggtg

SEQ ID NO: 42407 - DNA, 15 bp, Homo sapiens
cccgcatgatggtgc

SEQ ID NO: 42408 - DNA, 15 bp, Homo sapiens
ccgcatgatggtgcc

SEQ ID NO: 42409 - DNA, 15 bp, Homo sapiens
cgcatgatggtgcct

SEQ ID NO: 42410 - DNA, 15 bp, Homo sapiens
gcatgatggtgcctg

SEQ ID NO: 42411 - DNA, 15 bp, Homo sapiens
catgatggtgcctgt

SEQ ID NO: 42412 - DNA, 15 bp, Homo sapiens
atgatggtgcctgtg

SEQ ID NO: 42413 - DNA, 15 bp, Homo sapiens
tgatggtgcctgtgt

SEQ ID NO: 42414 - DNA, 15 bp, Homo sapiens
gatggtgcctgtgtc

SEQ ID NO: 42415 - DNA, 15 bp, Homo sapiens
atggtgcctgtgtcc

SEQ ID NO: 42416 - DNA, 15 bp, Homo sapiens
tggtgcctgtgtcct

SEQ ID NO: 42417 - DNA, 15 bp, Homo sapiens
ggtgcctgtgtcctc

SEQ ID NO: 42418 - DNA, 15 bp, Homo sapiens
gtgcctgtgtcctcg

SEQ ID NO: 42419 - DNA, 15 bp, Homo sapiens
tgcctgtgtcctcga

SEQ ID NO: 42420 - DNA, 15 bp, Homo sapiens
gcctgtgtcctcgat

SEQ ID NO: 42421 - DNA, 15 bp, Homo sapiens
cctgtgtcctcgatg

SEQ ID NO: 42422 - DNA, 15 bp, Homo sapiens
ctgtgtcctcgatgg

SEQ ID NO: 42423 - DNA, 15 bp, Homo sapiens
tgtgtcctcgatggt

SEQ ID NO: 42424 - DNA, 15 bp, Homo sapiens
gtgtcctcgatggtc

SEQ ID NO: 42425 - DNA, 15 bp, Homo sapiens
tgtcctcgatggtct

SEQ ID NO: 42426 - DNA, 15 bp, Homo sapiens
gtcctcgatggtctg

SEQ ID NO: 42427 - DNA, 15 bp, Homo sapiens
tcctcgatggtctgg

SEQ ID NO: 42428 - DNA, 15 bp, Homo sapiens
cctcgatggtctgga

SEQ ID NO: 42429 - DNA, 15 bp, Homo sapiens
ctcgatggtctggat

SEQ ID NO: 42430 - DNA, 15 bp, Homo sapiens
tcgatggtctggatg

SEQ ID NO: 42431 - DNA, 15 bp, Homo sapiens
cgatggtctggatga

SEQ ID NO: 42432 - DNA, 15 bp, Homo sapiens
gatggtctggatgag

SEQ ID NO: 42433 - DNA, 15 bp, Homo sapiens
atggtctggatgagc

SEQ ID NO: 42434 - DNA, 15 bp, Homo sapiens
tggtctggatgagct

SEQ ID NO: 42435 - DNA, 15 bp, Homo sapiens
ggtctggatgagctg

SEQ ID NO: 42436 - DNA, 15 bp, Homo sapiens
gtctggatgagctgg

SEQ ID NO: 42437 - DNA, 15 bp, Homo sapiens
tctggatgagctggc

SEQ ID NO: 42438 - DNA, 15 bp, Homo sapiens
ctggatgagctggct

SEQ ID NO: 42439 - DNA, 15 bp, Homo sapiens
tggatgagctggctg

SEQ ID NO: 42440 - DNA, 15 bp, Homo sapiens
ggatgagctggctgc

SEQ ID NO: 42441 - DNA, 15 bp, Homo sapiens
gatgagctggctgca

SEQ ID NO: 42442 - DNA, 15 bp, Homo sapiens
atgagctggctgcag

SEQ ID NO: 42443 - DNA, 15 bp, Homo sapiens
tgagctggctgcagt

SEQ ID NO: 42444 - DNA, 15 bp, Homo sapiens
gagctggctgcagtt

SEQ ID NO: 42445 - DNA, 15 bp, Homo sapiens
agctggctgcagttc

SEQ ID NO: 42446 - DNA, 15 bp, Homo sapiens
gctggctgcagttct

SEQ ID NO: 42447 - DNA, 15 bp, Homo sapiens
ctggctgcagttctg

SEQ ID NO: 42448 - DNA, 15 bp, Homo sapiens
tggctgcagttctgg

SEQ ID NO: 42449 - DNA, 15 bp, Homo sapiens
ggctgcagttctggg

SEQ ID NO: 42450 - DNA, 15 bp, Homo sapiens
gctgcagttctgggg

SEQ ID NO: 42451 - DNA, 15 bp, Homo sapiens
ctgcagttctgggga

SEQ ID NO: 42452 - DNA, 15 bp, Homo sapiens
tgcagttctggggac

SEQ ID NO: 42453 - DNA, 15 bp, Homo sapiens
gcagttctggggaca

SEQ ID NO: 42454 - DNA, 15 bp, Homo sapiens
cagttctggggacaa

SEQ ID NO: 42455 - DNA, 15 bp, Homo sapiens
agttctggggacaac

SEQ ID NO: 42456 - DNA, 15 bp, Homo sapiens
gttctggggacaaca

SEQ ID NO: 42457 - DNA, 15 bp, Homo sapiens
ttctggggacaacag

SEQ ID NO: 42458 - DNA, 15 bp, Homo sapiens
tctggggacaacagg

SEQ ID NO: 42459 - DNA, 15 bp, Homo sapiens
ctggggacaacagga

SEQ ID NO: 42460 - DNA, 15 bp, Homo sapiens
tggggacaacaggag

SEQ ID NO: 42461 - DNA, 15 bp, Homo sapiens
ggggacaacaggagc

SEQ ID NO: 42462 - DNA, 15 bp, Homo sapiens
gggacaacaggagca

SEQ ID NO: 42463 - DNA, 15 bp, Homo sapiens
ggacaacaggagcag

SEQ ID NO: 42464 - DNA, 15 bp, Homo sapiens
gacaacaggagcaga

SEQ ID NO: 42465 - DNA, 15 bp, Homo sapiens
acaacaggagcagaa

SEQ ID NO: 42466 - DNA, 15 bp, Homo sapiens
caacaggagcagaag

SEQ ID NO: 42467 - DNA, 15 bp, Homo sapiens
aacaggagcagaagg

SEQ ID NO: 42468 - DNA, 15 bp, Homo sapiens
acaggagcagaaggc

SEQ ID NO: 42469 - DNA, 15 bp, Homo sapiens
caggagcagaaggct

SEQ ID NO: 42470 - DNA, 15 bp, Homo sapiens
aggagcagaaggctt

SEQ ID NO: 42471 - DNA, 15 bp, Homo sapiens
ggagcagaaggcttg

SEQ ID NO: 42472 - DNA, 15 bp, Homo sapiens
gagcagaaggcttgc

SEQ ID NO: 42473 - DNA, 15 bp, Homo sapiens
agcagaaggcttgca

SEQ ID NO: 42474 - DNA, 15 bp, Homo sapiens
gcagaaggcttgcac

SEQ ID NO: 42475 - DNA, 15 bp, Homo sapiens
cagaaggcttgcacc

SEQ ID NO: 42476 - DNA, 15 bp, Homo sapiens
agaaggcttgcaccc

SEQ ID NO: 42477 - DNA, 15 bp, Homo sapiens
gaaggcttgcaccca

SEQ ID NO: 42478 - DNA, 15 bp, Homo sapiens
aaggcttgcacccag

SEQ ID NO: 42479 - DNA, 15 bp, Homo sapiens
aggcttgcacccagt

SEQ ID NO: 42480 - DNA, 15 bp, Homo sapiens
ggcttgcacccagtc

SEQ ID NO: 42481 - DNA, 15 bp, Homo sapiens
gcttgcacccagtcc

SEQ ID NO: 42482 - DNA, 15 bp, Homo sapiens
cttgcacccagtccc

SEQ ID NO: 42483 - DNA, 15 bp, Homo sapiens
ttgcacccagtccca

SEQ ID NO: 42484 - DNA, 15 bp, Homo sapiens
tgcacccagtcccac

SEQ ID NO: 42485 - DNA, 15 bp, Homo sapiens
gcacccagtcccacc

SEQ ID NO: 42486 - DNA, 15 bp, Homo sapiens
cacccagtcccaccc

SEQ ID NO: 42487 - DNA, 15 bp, Homo sapiens
acccagtcccaccca

SEQ ID NO: 42488 - DNA, 15 bp, Homo sapiens
cccagtcccacccac

SEQ ID NO: 42489 - DNA, 15 bp, Homo sapiens
ccagtcccacccacc

SEQ ID NO: 42490 - DNA, 15 bp, Homo sapiens
cagtcccacccaccc

SEQ ID NO: 42491 - DNA, 15 bp, Homo sapiens
agtcccacccacccc

SEQ ID NO: 42492 - DNA, 15 bp, Homo sapiens
gtcccacccaccccc

SEQ ID NO: 42493 - DNA, 15 bp, Homo sapiens
tcccacccaccccca

SEQ ID NO: 42494 - DNA, 15 bp, Homo sapiens
cccacccacccccag

SEQ ID NO: 42495 - DNA, 15 bp, Homo sapiens
ccacccacccccagc

SEQ ID NO: 42496 - DNA, 15 bp, Homo sapiens
cacccacccccagca

SEQ ID NO: 42497 - DNA, 15 bp, Homo sapiens
acccacccccagcag

SEQ ID NO: 42498 - DNA, 15 bp, Homo sapiens
cccacccccagcagc

SEQ ID NO: 42499 - DNA, 15 bp, Homo sapiens
ccacccccagcagcc

SEQ ID NO: 42500 - DNA, 15 bp, Homo sapiens
cacccccagcagccc

SEQ ID NO: 42501 - DNA, 15 bp, Homo sapiens
acccccagcagcccc

SEQ ID NO: 42502 - DNA, 15 bp, Homo sapiens
cccccagcagcccca

SEQ ID NO: 42503 - DNA, 15 bp, Homo sapiens
ccccagcagccccac

SEQ ID NO: 42504 - DNA, 15 bp, Homo sapiens
cccagcagccccacc

SEQ ID NO: 42505 - DNA, 15 bp, Homo sapiens
ccagcagccccaccc

SEQ ID NO: 42506 - DNA, 15 bp, Homo sapiens
cagcagccccacccc

SEQ ID NO: 42507 - DNA, 15 bp, Homo sapiens
agcagccccacccca

SEQ ID NO: 42508 - DNA, 15 bp, Homo sapiens
gcagccccaccccag

SEQ ID NO: 42509 - DNA, 15 bp, Homo sapiens
cagccccaccccagg

SEQ ID NO: 42510 - DNA, 15 bp, Homo sapiens
agccccaccccaggc

SEQ ID NO: 42511 - DNA, 15 bp, Homo sapiens
gccccaccccaggca

SEQ ID NO: 42512 - DNA, 15 bp, Homo sapiens
ccccaccccaggcac

SEQ ID NO: 42513 - DNA, 15 bp, Homo sapiens
cccaccccaggcaca

SEQ ID NO: 42514 - DNA, 15 bp, Homo sapiens
ccaccccaggcacat

SEQ ID NO: 42515 - DNA, 15 bp, Homo sapiens
caccccaggcacatg

SEQ ID NO: 42516 - DNA, 15 bp, Homo sapiens
accccaggcacatgt

SEQ ID NO: 42517 - DNA, 15 bp, Homo sapiens
ccccaggcacatgtc

SEQ ID NO: 42518 - DNA, 15 bp, Homo sapiens
cccaggcacatgtct

SEQ ID NO: 42519 - DNA, 15 bp, Homo sapiens
ccaggcacatgtctc

SEQ ID NO: 42520 - DNA, 15 bp, Homo sapiens
caggcacatgtctcc

SEQ ID NO: 42521 - DNA, 15 bp, Homo sapiens
aggcacatgtctccc

SEQ ID NO: 42522 - DNA, 15 bp, Homo sapiens
ggcacatgtctcccc

SEQ ID NO: 42523 - DNA, 15 bp, Homo sapiens
gcacatgtctcccct

SEQ ID NO: 42524 - DNA, 15 bp, Homo sapiens
cacatgtctcccctc

SEQ ID NO: 42525 - DNA, 15 bp, Homo sapiens
acatgtctcccctca

SEQ ID NO: 42526 - DNA, 15 bp, Homo sapiens
catgtctcccctcac

SEQ ID NO: 42527 - DNA, 15 bp, Homo sapiens
atgtctcccctcacc

SEQ ID NO: 42528 - DNA, 15 bp, Homo sapiens
tgtctcccctcacct

SEQ ID NO: 42529 - DNA, 15 bp, Homo sapiens
gtctcccctcacctc

SEQ ID NO: 42530 - DNA, 15 bp, Homo sapiens
tctcccctcacctcg

SEQ ID NO: 42531 - DNA, 15 bp, Homo sapiens
ctcccctcacctcgt

SEQ ID NO: 42532 - DNA, 15 bp, Homo sapiens
tcccctcacctcgtg

SEQ ID NO: 42533 - DNA, 15 bp, Homo sapiens
cccctcacctcgtgc

SEQ ID NO: 42534 - DNA, 15 bp, Homo sapiens
ccctcacctcgtgca

SEQ ID NO: 42535 - DNA, 15 bp, Homo sapiens
cctcacctcgtgcag

SEQ ID NO: 42536 - DNA, 15 bp, Homo sapiens
ctcacctcgtgcaga

SEQ ID NO: 42537 - DNA, 15 bp, Homo sapiens
tcacctcgtgcagag

SEQ ID NO: 42538 - DNA, 15 bp, Homo sapiens
cacctcgtgcagagc

SEQ ID NO: 42539 - DNA, 15 bp, Homo sapiens
acctcgtgcagagca

SEQ ID NO: 42540 - DNA, 15 bp, Homo sapiens
cctcgtgcagagcag

SEQ ID NO: 42541 - DNA, 15 bp, Homo sapiens
ctcgtgcagagcagc

SEQ ID NO: 42542 - DNA, 15 bp, Homo sapiens
tcgtgcagagcagct

SEQ ID NO: 42543 - DNA, 15 bp, Homo sapiens
cgtgcagagcagcta

SEQ ID NO: 42544 - DNA, 15 bp, Homo sapiens
gtgcagagcagctag

SEQ ID NO: 42545 - DNA, 15 bp, Homo sapiens
tgcagagcagctaga

SEQ ID NO: 42546 - DNA, 15 bp, Homo sapiens
gcagagcagctagat

SEQ ID NO: 42547 - DNA, 15 bp, Homo sapiens
cagagcagctagata

SEQ ID NO: 42548 - DNA, 15 bp, Homo sapiens
agagcagctagatac

SEQ ID NO: 42549 - DNA, 15 bp, Homo sapiens
gagcagctagatact

SEQ ID NO: 42550 - DNA, 15 bp, Homo sapiens
agcagctagatactt

SEQ ID NO: 42551 - DNA, 15 bp, Homo sapiens
gcagctagatactta

SEQ ID NO: 42552 - DNA, 15 bp, Homo sapiens
cagctagatacttat

SEQ ID NO: 42553 - DNA, 15 bp, Homo sapiens
agctagatacttata

SEQ ID NO: 42554 - DNA, 15 bp, Homo sapiens
gctagatacttatag

SEQ ID NO: 42555 - DNA, 15 bp, Homo sapiens
ctagatacttatagg

SEQ ID NO: 42556 - DNA, 15 bp, Homo sapiens
tagatacttataggc

SEQ ID NO: 42557 - DNA, 15 bp, Homo sapiens
agatacttataggcc

SEQ ID NO: 42558 - DNA, 15 bp, Homo sapiens
gatacttataggcct

SEQ ID NO: 42559 - DNA, 15 bp, Homo sapiens
atacttataggcctt

SEQ ID NO: 42560 - DNA, 15 bp, Homo sapiens
tacttataggccttc

SEQ ID NO: 42561 - DNA, 15 bp, Homo sapiens
acttataggccttcc

SEQ ID NO: 42562 - DNA, 15 bp, Homo sapiens
cttataggccttccg

SEQ ID NO: 42563 - DNA, 15 bp, Homo sapiens
ttataggccttccga

SEQ ID NO: 42564 - DNA, 15 bp, Homo sapiens
tataggccttccgaa

SEQ ID NO: 42565 - DNA, 15 bp, Homo sapiens
ataggccttccgaac

SEQ ID NO: 42566 - DNA, 15 bp, Homo sapiens
taggccttccgaaca

SEQ ID NO: 42567 - DNA, 15 bp, Homo sapiens
aggccttccgaacag

SEQ ID NO: 42568 - DNA, 15 bp, Homo sapiens
ggccttccgaacagc

SEQ ID NO: 42569 - DNA, 15 bp, Homo sapiens
gccttccgaacagca

SEQ ID NO: 42570 - DNA, 15 bp, Homo sapiens
ccttccgaacagcat

SEQ ID NO: 42571 - DNA, 15 bp, Homo sapiens
cttccgaacagcatc

SEQ ID NO: 42572 - DNA, 15 bp, Homo sapiens
ttccgaacagcatcg

SEQ ID NO: 42573 - DNA, 15 bp, Homo sapiens
tccgaacagcatcgt

SEQ ID NO: 42574 - DNA, 15 bp, Homo sapiens
ccgaacagcatcgtc

SEQ ID NO: 42575 - DNA, 15 bp, Homo sapiens
cgaacagcatcgtcc

SEQ ID NO: 42576 - DNA, 15 bp, Homo sapiens
gaacagcatcgtcct

SEQ ID NO: 42577 - DNA, 15 bp, Homo sapiens
aacagcatcgtcctt

SEQ ID NO: 42578 - DNA, 15 bp, Homo sapiens
acagcatcgtccttc

SEQ ID NO: 42579 - DNA, 15 bp, Homo sapiens
cagcatcgtccttct

SEQ ID NO: 42580 - DNA, 15 bp, Homo sapiens
agcatcgtccttctt

SEQ ID NO: 42581 - DNA, 15 bp, Homo sapiens
gcatcgtccttcttg

SEQ ID NO: 42582 - DNA, 15 bp, Homo sapiens
catcgtccttcttgg

SEQ ID NO: 42583 - DNA, 15 bp, Homo sapiens
atcgtccttcttggc

SEQ ID NO: 42584 - DNA, 15 bp, Homo sapiens
tcgtccttcttggca

SEQ ID NO: 42585 - DNA, 15 bp, Homo sapiens
cgtccttcttggcat

SEQ ID NO: 42586 - DNA, 15 bp, Homo sapiens
gtccttcttggcatc

SEQ ID NO: 42587 - DNA, 15 bp, Homo sapiens
tccttcttggcatcc

SEQ ID NO: 42588 - DNA, 15 bp, Homo sapiens
ccttcttggcatcct

SEQ ID NO: 42589 - DNA, 15 bp, Homo sapiens
cttcttggcatcctg

SEQ ID NO: 42590 - DNA, 15 bp, Homo sapiens
ttcttggcatcctga

SEQ ID NO: 42591 - DNA, 15 bp, Homo sapiens
tcttggcatcctgac

SEQ ID NO: 42592 - DNA, 15 bp, Homo sapiens
cttggcatcctgacc

SEQ ID NO: 42593 - DNA, 15 bp, Homo sapiens
ttggcatcctgacca

SEQ ID NO: 42594 - DNA, 15 bp, Homo sapiens
tggcatcctgaccag

SEQ ID NO: 42595 - DNA, 15 bp, Homo sapiens
ggcatcctgaccaga

SEQ ID NO: 42596 - DNA, 15 bp, Homo sapiens
gcatcctgaccagac

SEQ ID NO: 42597 - DNA, 15 bp, Homo sapiens
catcctgaccagaca

SEQ ID NO: 42598 - DNA, 15 bp, Homo sapiens
atcctgaccagacac

SEQ ID NO: 42599 - DNA, 15 bp, Homo sapiens
tcctgaccagacaca

SEQ ID NO: 42600 - DNA, 15 bp, Homo sapiens
cctgaccagacacag

SEQ ID NO: 42601 - DNA, 15 bp, Homo sapiens
ctgaccagacacagg

SEQ ID NO: 42602 - DNA, 15 bp, Homo sapiens
tgaccagacacaggg

SEQ ID NO: 42603 - DNA, 15 bp, Homo sapiens
gaccagacacaggga

SEQ ID NO: 42604 - DNA, 15 bp, Homo sapiens
accagacacagggac

SEQ ID NO: 42605 - DNA, 15 bp, Homo sapiens
ccagacacagggacc

SEQ ID NO: 42606 - DNA, 15 bp, Homo sapiens
cagacacagggacct

SEQ ID NO: 42607 - DNA, 15 bp, Homo sapiens
agacacagggacctc

SEQ ID NO: 42608 - DNA, 15 bp, Homo sapiens
gacacagggacctca

SEQ ID NO: 42609 - DNA, 15 bp, Homo sapiens
acacagggacctcaa

SEQ ID NO: 42610 - DNA, 15 bp, Homo sapiens
cacagggacctcaaa

SEQ ID NO: 42611 - DNA, 15 bp, Homo sapiens
acagggacctcaaag

SEQ ID NO: 42612 - DNA, 15 bp, Homo sapiens
cagggacctcaaagg

SEQ ID NO: 42613 - DNA, 15 bp, Homo sapiens
agggacctcaaaggt

SEQ ID NO: 42614 - DNA, 15 bp, Homo sapiens
gggacctcaaaggta

SEQ ID NO: 42615 - DNA, 15 bp, Homo sapiens
ggacctcaaaggtat

SEQ ID NO: 42616 - DNA, 15 bp, Homo sapiens
gacctcaaaggtatc

SEQ ID NO: 42617 - DNA, 15 bp, Homo sapiens
acctcaaaggtatca

SEQ ID NO: 42618 - DNA, 15 bp, Homo sapiens
cctcaaaggtatcag

SEQ ID NO: 42619 - DNA, 15 bp, Homo sapiens
ctcaaaggtatcagt

SEQ ID NO: 42620 - DNA, 15 bp, Homo sapiens
tcaaaggtatcagtg

SEQ ID NO: 42621 - DNA, 15 bp, Homo sapiens
caaaggtatcagtgg

SEQ ID NO: 42622 - DNA, 15 bp, Homo sapiens
aaaggtatcagtggg

SEQ ID NO: 42623 - DNA, 15 bp, Homo sapiens
aaggtatcagtgggc

SEQ ID NO: 42624 - DNA, 15 bp, Homo sapiens
aggtatcagtgggct

SEQ ID NO: 42625 - DNA, 15 bp, Homo sapiens
ggtatcagtgggctg

SEQ ID NO: 42626 - DNA, 15 bp, Homo sapiens
gtatcagtgggctgc

SEQ ID NO: 42627 - DNA, 15 bp, Homo sapiens
tatcagtgggctgcc

SEQ ID NO: 42628 - DNA, 15 bp, Homo sapiens
atcagtgggctgccc

SEQ ID NO: 42629 - DNA, 15 bp, Homo sapiens
tcagtgggctgccct

SEQ ID NO: 42630 - DNA, 15 bp, Homo sapiens
cagtgggctgccctt

SEQ ID NO: 42631 - DNA, 15 bp, Homo sapiens
agtgggctgcccttg

SEQ ID NO: 42632 - DNA, 15 bp, Homo sapiens
gtgggctgcccttga

SEQ ID NO: 42633 - DNA, 15 bp, Homo sapiens
tgggctgcccttgac

SEQ ID NO: 42634 - DNA, 15 bp, Homo sapiens
gggctgcccttgacc

SEQ ID NO: 42635 - DNA, 15 bp, Homo sapiens
ggctgcccttgacca

SEQ ID NO: 42636 - DNA, 15 bp, Homo sapiens
gctgcccttgaccat

SEQ ID NO: 42637 - DNA, 15 bp, Homo sapiens
ctgcccttgaccatc

SEQ ID NO: 42638 - DNA, 15 bp, Homo sapiens
tgcccttgaccatct

SEQ ID NO: 42639 - DNA, 15 bp, Homo sapiens
gcccttgaccatctc

SEQ ID NO: 42640 - DNA, 15 bp, Homo sapiens
cccttgaccatctcc

SEQ ID NO: 42641 - DNA, 15 bp, Homo sapiens
ccttgaccatctcca

SEQ ID NO: 42642 - DNA, 15 bp, Homo sapiens
cttgaccatctccat

SEQ ID NO: 42643 - DNA, 15 bp, Homo sapiens
ttgaccatctccatg

SEQ ID NO: 42644 - DNA, 15 bp, Homo sapiens
tgaccatctccatgc

SEQ ID NO: 42645 - DNA, 15 bp, Homo sapiens
gaccatctccatgcc

SEQ ID NO: 42646 - DNA, 15 bp, Homo sapiens
accatctccatgccc

SEQ ID NO: 42647 - DNA, 15 bp, Homo sapiens
ccatctccatgccct

SEQ ID NO: 42648 - DNA, 15 bp, Homo sapiens
catctccatgcccta

SEQ ID NO: 42649 - DNA, 15 bp, Homo sapiens
atctccatgccctaa

SEQ ID NO: 42650 - DNA, 15 bp, Homo sapiens
tctccatgccctaag

SEQ ID NO: 42651 - DNA, 15 bp, Homo sapiens
ctccatgccctaaga

SEQ ID NO: 42652 - DNA, 15 bp, Homo sapiens
tccatgccctaagaa

SEQ ID NO: 42653 - DNA, 15 bp, Homo sapiens
ccatgccctaagaag

SEQ ID NO: 42654 - DNA, 15 bp, Homo sapiens
catgccctaagaagg

SEQ ID NO: 42655 - DNA, 15 bp, Homo sapiens
atgccctaagaaggc

SEQ ID NO: 42656 - DNA, 15 bp, Homo sapiens
tgccctaagaaggcc

SEQ ID NO: 42657 - DNA, 15 bp, Homo sapiens
gccctaagaaggcca

SEQ ID NO: 42658 - DNA, 15 bp, Homo sapiens
ccctaagaaggccac

SEQ ID NO: 42659 - DNA, 15 bp, Homo sapiens
cctaagaaggccacc

SEQ ID NO: 42660 - DNA, 15 bp, Homo sapiens
ctaagaaggccaccc

SEQ ID NO: 42661 - DNA, 15 bp, Homo sapiens
taagaaggccaccct

SEQ ID NO: 42662 - DNA, 15 bp, Homo sapiens
aagaaggccaccctc

SEQ ID NO: 42663 - DNA, 15 bp, Homo sapiens
agaaggccaccctct

SEQ ID NO: 42664 - DNA, 15 bp, Homo sapiens
gaaggccaccctctc

SEQ ID NO: 42665 - DNA, 15 bp, Homo sapiens
aaggccaccctctcc

SEQ ID NO: 42666 - DNA, 15 bp, Homo sapiens
aggccaccctctccc

SEQ ID NO: 42667 - DNA, 15 bp, Homo sapiens
ggccaccctctccca

SEQ ID NO: 42668 - DNA, 15 bp, Homo sapiens
gccaccctctcccac

SEQ ID NO: 42669 - DNA, 15 bp, Homo sapiens
ccaccctctcccacc

SEQ ID NO: 42670 - DNA, 15 bp, Homo sapiens
caccctctcccacca

SEQ ID NO: 42671 - DNA, 15 bp, Homo sapiens
accctctcccaccac

SEQ ID NO: 42672 - DNA, 15 bp, Homo sapiens
ccctctcccaccacc

SEQ ID NO: 42673 - DNA, 15 bp, Homo sapiens
cctctcccaccaccc

SEQ ID NO: 42674 - DNA, 15 bp, Homo sapiens
ctctcccaccacccc

SEQ ID NO: 42675 - DNA, 15 bp, Homo sapiens
tctcccaccacccca

SEQ ID NO: 42676 - DNA, 15 bp, Homo sapiens
ctcccaccaccccac

SEQ ID NO: 42677 - DNA, 15 bp, Homo sapiens
tcccaccaccccact

SEQ ID NO: 42678 - DNA, 15 bp, Homo sapiens
cccaccaccccacta

SEQ ID NO: 42679 - DNA, 15 bp, Homo sapiens
ccaccaccccactag

SEQ ID NO: 42680 - DNA, 15 bp, Homo sapiens
caccaccccactagc

SEQ ID NO: 42681 - DNA, 15 bp, Homo sapiens
accaccccactagct

SEQ ID NO: 42682 - DNA, 15 bp, Homo sapiens
ccaccccactagctt

SEQ ID NO: 42683 - DNA, 15 bp, Homo sapiens
caccccactagcttc

SEQ ID NO: 42684 - DNA, 15 bp, Homo sapiens
accccactagcttca

SEQ ID NO: 42685 - DNA, 15 bp, Homo sapiens
ccccactagcttcat

SEQ ID NO: 42686 - DNA, 15 bp, Homo sapiens
cccactagcttcatc

SEQ ID NO: 42687 - DNA, 15 bp, Homo sapiens
ccactagcttcatcc

SEQ ID NO: 42688 - DNA, 15 bp, Homo sapiens
cactagcttcatcct

SEQ ID NO: 42689 - DNA, 15 bp, Homo sapiens
actagcttcatcctc

SEQ ID NO: 42690 - DNA, 15 bp, Homo sapiens
ctagcttcatcctcc

SEQ ID NO: 42691 - DNA, 15 bp, Homo sapiens
tagcttcatcctcca

SEQ ID NO: 42692 - DNA, 15 bp, Homo sapiens
agcttcatcctccat

SEQ ID NO: 42693 - DNA, 15 bp, Homo sapiens
gcttcatcctccatg

SEQ ID NO: 42694 - DNA, 15 bp, Homo sapiens
cttcatcctccatga

SEQ ID NO: 42695 - DNA, 15 bp, Homo sapiens
ttcatcctccatgaa

SEQ ID NO: 42696 - DNA, 15 bp, Homo sapiens
tcatcctccatgaaa

SEQ ID NO: 42697 - DNA, 15 bp, Homo sapiens
catcctccatgaaac

SEQ ID NO: 42698 - DNA, 15 bp, Homo sapiens
atcctccatgaaaca

SEQ ID NO: 42699 - DNA, 15 bp, Homo sapiens
tcctccatgaaacaa

SEQ ID NO: 42700 - DNA, 15 bp, Homo sapiens
cctccatgaaacaaa

SEQ ID NO: 42701 - DNA, 15 bp, Homo sapiens
ctccatgaaacaaag

SEQ ID NO: 42702 - DNA, 15 bp, Homo sapiens
tccatgaaacaaagc

SEQ ID NO: 42703 - DNA, 15 bp, Homo sapiens
ccatgaaacaaagcc

SEQ ID NO: 42704 - DNA, 15 bp, Homo sapiens
catgaaacaaagcca

SEQ ID NO: 42705 - DNA, 15 bp, Homo sapiens
atgaaacaaagccag

SEQ ID NO: 42706 - DNA, 15 bp, Homo sapiens
tgaaacaaagccagc

SEQ ID NO: 42707 - DNA, 15 bp, Homo sapiens
gaaacaaagccagcc

SEQ ID NO: 42708 - DNA, 15 bp, Homo sapiens
aaacaaagccagccc

SEQ ID NO: 42709 - DNA, 15 bp, Homo sapiens
aacaaagccagccct

SEQ ID NO: 42710 - DNA, 15 bp, Homo sapiens
acaaagccagccctg

SEQ ID NO: 42711 - DNA, 15 bp, Homo sapiens
caaagccagccctgg

SEQ ID NO: 42712 - DNA, 15 bp, Homo sapiens
aaagccagccctggg

SEQ ID NO: 42713 - DNA, 15 bp, Homo sapiens
aagccagccctgggt

SEQ ID NO: 42714 - DNA, 15 bp, Homo sapiens
agccagccctgggta

SEQ ID NO: 42715 - DNA, 15 bp, Homo sapiens
gccagccctgggtat

SEQ ID NO: 42716 - DNA, 15 bp, Homo sapiens
ccagccctgggtatc

SEQ ID NO: 42717 - DNA, 15 bp, Homo sapiens
cagccctgggtatca

SEQ ID NO: 42718 - DNA, 15 bp, Homo sapiens
agccctgggtatcag

SEQ ID NO: 42719 - DNA, 15 bp, Homo sapiens
gccctgggtatcagt

SEQ ID NO: 42720 - DNA, 15 bp, Homo sapiens
ccctgggtatcagtg

SEQ ID NO: 42721 - DNA, 15 bp, Homo sapiens
cctgggtatcagtgc

SEQ ID NO: 42722 - DNA, 15 bp, Homo sapiens
ctgggtatcagtgca

SEQ ID NO: 42723 - DNA, 15 bp, Homo sapiens
tgggtatcagtgcac

SEQ ID NO: 42724 - DNA, 15 bp, Homo sapiens
gggtatcagtgcacc

SEQ ID NO: 42725 - DNA, 15 bp, Homo sapiens
ggtatcagtgcacct

SEQ ID NO: 42726 - DNA, 15 bp, Homo sapiens
gtatcagtgcacctc

SEQ ID NO: 42727 - DNA, 15 bp, Homo sapiens
tatcagtgcacctcc

SEQ ID NO: 42728 - DNA, 15 bp, Homo sapiens
atcagtgcacctcca

SEQ ID NO: 42729 - DNA, 15 bp, Homo sapiens
tcagtgcacctccag

SEQ ID NO: 42730 - DNA, 15 bp, Homo sapiens
cagtgcacctccagc

SEQ ID NO: 42731 - DNA, 15 bp, Homo sapiens
agtgcacctccagcc

SEQ ID NO: 42732 - DNA, 15 bp, Homo sapiens
gtgcacctccagcct

SEQ ID NO: 42733 - DNA, 15 bp, Homo sapiens
tgcacctccagcctc

SEQ ID NO: 42734 - DNA, 15 bp, Homo sapiens
gcacctccagcctcg

SEQ ID NO: 42735 - DNA, 15 bp, Homo sapiens
cacctccagcctcgc

SEQ ID NO: 42736 - DNA, 15 bp, Homo sapiens
acctccagcctcgca

SEQ ID NO: 42737 - DNA, 15 bp, Homo sapiens
cctccagcctcgcac

SEQ ID NO: 42738 - DNA, 15 bp, Homo sapiens
ctccagcctcgcaca

SEQ ID NO: 42739 - DNA, 15 bp, Homo sapiens
tccagcctcgcacag

SEQ ID NO: 42740 - DNA, 15 bp, Homo sapiens
ccagcctcgcacagg

SEQ ID NO: 42741 - DNA, 15 bp, Homo sapiens
cagcctcgcacaggg

SEQ ID NO: 42742 - DNA, 15 bp, Homo sapiens
agcctcgcacagggc

SEQ ID NO: 42743 - DNA, 15 bp, Homo sapiens
gcctcgcacagggcc

SEQ ID NO: 42744 - DNA, 15 bp, Homo sapiens
cctcgcacagggcct

SEQ ID NO: 42745 - DNA, 15 bp, Homo sapiens
ctcgcacagggcctg

SEQ ID NO: 42746 - DNA, 15 bp, Homo sapiens
tcgcacagggcctgg

SEQ ID NO: 42747 - DNA, 15 bp, Homo sapiens
cgcacagggcctggg

SEQ ID NO: 42748 - DNA, 15 bp, Homo sapiens
gcacagggcctgggt

SEQ ID NO: 42749 - DNA, 15 bp, Homo sapiens
cacagggcctgggtc

SEQ ID NO: 42750 - DNA, 15 bp, Homo sapiens
acagggcctgggtct

SEQ ID NO: 42751 - DNA, 15 bp, Homo sapiens
cagggcctgggtctg

SEQ ID NO: 42752 - DNA, 15 bp, Homo sapiens
agggcctgggtctgg

SEQ ID NO: 42753 - DNA, 15 bp, Homo sapiens
gggcctgggtctgga

SEQ ID NO: 42754 - DNA, 15 bp, Homo sapiens
ggcctgggtctggac

SEQ ID NO: 42755 - DNA, 15 bp, Homo sapiens
gcctgggtctggacc

SEQ ID NO: 42756 - DNA, 15 bp, Homo sapiens
cctgggtctggaccc

SEQ ID NO: 42757 - DNA, 15 bp, Homo sapiens
ctgggtctggacccc

SEQ ID NO: 42758 - DNA, 15 bp, Homo sapiens
tgggtctggacccca

SEQ ID NO: 42759 - DNA, 15 bp, Homo sapiens
gggtctggaccccag

SEQ ID NO: 42760 - DNA, 15 bp, Homo sapiens
ggtctggaccccagc

SEQ ID NO: 42761 - DNA, 15 bp, Homo sapiens
gtctggaccccagcc

SEQ ID NO: 42762 - DNA, 15 bp, Homo sapiens
tctggaccccagcca

SEQ ID NO: 42763 - DNA, 15 bp, Homo sapiens
ctggaccccagccag

SEQ ID NO: 42764 - DNA, 15 bp, Homo sapiens
tggaccccagccagc

SEQ ID NO: 42765 - DNA, 15 bp, Homo sapiens
ggaccccagccagcc

SEQ ID NO: 42766 - DNA, 15 bp, Homo sapiens
gaccccagccagcca

SEQ ID NO: 42767 - DNA, 15 bp, Homo sapiens
accccagccagccaa

SEQ ID NO: 42768 - DNA, 15 bp, Homo sapiens
ccccagccagccaat

SEQ ID NO: 42769 - DNA, 15 bp, Homo sapiens
cccagccagccaatt

SEQ ID NO: 42770 - DNA, 15 bp, Homo sapiens
ccagccagccaatta

SEQ ID NO: 42771 - DNA, 15 bp, Homo sapiens
cagccagccaattag

SEQ ID NO: 42772 - DNA, 15 bp, Homo sapiens
agccagccaattagc

SEQ ID NO: 42773 - DNA, 15 bp, Homo sapiens
gccagccaattagca

SEQ ID NO: 42774 - DNA, 15 bp, Homo sapiens
ccagccaattagcag

SEQ ID NO: 42775 - DNA, 15 bp, Homo sapiens
cagccaattagcaga

SEQ ID NO: 42776 - DNA, 15 bp, Homo sapiens
agccaattagcagat

SEQ ID NO: 42777 - DNA, 15 bp, Homo sapiens
gccaattagcagatg

SEQ ID NO: 42778 - DNA, 15 bp, Homo sapiens
ccaattagcagatgc

SEQ ID NO: 42779 - DNA, 15 bp, Homo sapiens
caattagcagatgca

SEQ ID NO: 42780 - DNA, 15 bp, Homo sapiens
aattagcagatgcac

SEQ ID NO: 42781 - DNA, 15 bp, Homo sapiens
attagcagatgcaca

SEQ ID NO: 42782 - DNA, 15 bp, Homo sapiens
ttagcagatgcacaa

SEQ ID NO: 42783 - DNA, 15 bp, Homo sapiens
tagcagatgcacaag

SEQ ID NO: 42784 - DNA, 15 bp, Homo sapiens
agcagatgcacaagg

SEQ ID NO: 42785 - DNA, 15 bp, Homo sapiens
gcagatgcacaaggc

SEQ ID NO: 42786 - DNA, 15 bp, Homo sapiens
cagatgcacaaggca

SEQ ID NO: 42787 - DNA, 15 bp, Homo sapiens
agatgcacaaggcag

SEQ ID NO: 42788 - DNA, 15 bp, Homo sapiens
gatgcacaaggcagc

SEQ ID NO: 42789 - DNA, 15 bp, Homo sapiens
atgcacaaggcagca

SEQ ID NO: 42790 - DNA, 15 bp, Homo sapiens
tgcacaaggcagcag

SEQ ID NO: 42791 - DNA, 15 bp, Homo sapiens
gcacaaggcagcagc

SEQ ID NO: 42792 - DNA, 15 bp, Homo sapiens
cacaaggcagcagcc

SEQ ID NO: 42793 - DNA, 15 bp, Homo sapiens
acaaggcagcagccc

SEQ ID NO: 42794 - DNA, 15 bp, Homo sapiens
caaggcagcagccca

SEQ ID NO: 42795 - DNA, 15 bp, Homo sapiens
aaggcagcagcccag

SEQ ID NO: 42796 - DNA, 15 bp, Homo sapiens
aggcagcagcccagc

SEQ ID NO: 42797 - DNA, 15 bp, Homo sapiens
ggcagcagcccagcc

SEQ ID NO: 42798 - DNA, 15 bp, Homo sapiens
gcagcagcccagcct

SEQ ID NO: 42799 - DNA, 15 bp, Homo sapiens
cagcagcccagcctc

SEQ ID NO: 42800 - DNA, 15 bp, Homo sapiens
agcagcccagcctca

SEQ ID NO: 42801 - DNA, 15 bp, Homo sapiens
gcagcccagcctcac

SEQ ID NO: 42802 - DNA, 15 bp, Homo sapiens
cagcccagcctcacc

SEQ ID NO: 42803 - DNA, 15 bp, Homo sapiens
agcccagcctcaccc

SEQ ID NO: 42804 - DNA, 15 bp, Homo sapiens
gcccagcctcacccc

SEQ ID NO: 42805 - DNA, 15 bp, Homo sapiens
cccagcctcacccca

SEQ ID NO: 42806 - DNA, 15 bp, Homo sapiens
ccagcctcaccccac

SEQ ID NO: 42807 - DNA, 15 bp, Homo sapiens
cagcctcaccccact

SEQ ID NO: 42808 - DNA, 15 bp, Homo sapiens
agcctcaccccactc

SEQ ID NO: 42809 - DNA, 15 bp, Homo sapiens
gcctcaccccactca

SEQ ID NO: 42810 - DNA, 15 bp, Homo sapiens
cctcaccccactcac

SEQ ID NO: 42811 - DNA, 15 bp, Homo sapiens
ctcaccccactcacc

SEQ ID NO: 42812 - DNA, 15 bp, Homo sapiens
tcaccccactcaccc

SEQ ID NO: 42813 - DNA, 15 bp, Homo sapiens
caccccactcacccc

SEQ ID NO: 42814 - DNA, 15 bp, Homo sapiens
accccactcaccccc

SEQ ID NO: 42815 - DNA, 15 bp, Homo sapiens
ccccactcacccccg

SEQ ID NO: 42816 - DNA, 15 bp, Homo sapiens
cccactcacccccgc

SEQ ID NO: 42817 - DNA, 15 bp, Homo sapiens
ccactcacccccgcc

SEQ ID NO: 42818 - DNA, 15 bp, Homo sapiens
cactcacccccgccc

SEQ ID NO: 42819 - DNA, 15 bp, Homo sapiens
actcacccccgccca

SEQ ID NO: 42820 - DNA, 15 bp, Homo sapiens
ctcacccccgcccaa

SEQ ID NO: 42821 - DNA, 15 bp, Homo sapiens
tcacccccgcccaac

SEQ ID NO: 42822 - DNA, 15 bp, Homo sapiens
cacccccgcccaacc

SEQ ID NO: 42823 - DNA, 15 bp, Homo sapiens
acccccgcccaacct

SEQ ID NO: 42824 - DNA, 15 bp, Homo sapiens
cccccgcccaacctg

SEQ ID NO: 42825 - DNA, 15 bp, Homo sapiens
ccccgcccaacctgc

SEQ ID NO: 42826 - DNA, 15 bp, Homo sapiens
cccgcccaacctgcc

SEQ ID NO: 42827 - DNA, 15 bp, Homo sapiens
ccgcccaacctgccc

SEQ ID NO: 42828 - DNA, 15 bp, Homo sapiens
cgcccaacctgcccc

SEQ ID NO: 42829 - DNA, 15 bp, Homo sapiens
gcccaacctgcccca

SEQ ID NO: 42830 - DNA, 15 bp, Homo sapiens
cccaacctgccccac

SEQ ID NO: 42831 - DNA, 15 bp, Homo sapiens
ccaacctgccccaca

SEQ ID NO: 42832 - DNA, 15 bp, Homo sapiens
caacctgccccacac

SEQ ID NO: 42833 - DNA, 15 bp, Homo sapiens
aacctgccccacacc

SEQ ID NO: 42834 - DNA, 15 bp, Homo sapiens
acctgccccacacct

SEQ ID NO: 42835 - DNA, 15 bp, Homo sapiens
cctgccccacacctt

SEQ ID NO: 42836 - DNA, 15 bp, Homo sapiens
ctgccccacaccttg

SEQ ID NO: 42837 - DNA, 15 bp, Homo sapiens
tgccccacaccttga

SEQ ID NO: 42838 - DNA, 15 bp, Homo sapiens
gccccacaccttgaa

SEQ ID NO: 42839 - DNA, 15 bp, Homo sapiens
ccccacaccttgaac

SEQ ID NO: 42840 - DNA, 15 bp, Homo sapiens
cccacaccttgaaca

SEQ ID NO: 42841 - DNA, 15 bp, Homo sapiens
ccacaccttgaacac

SEQ ID NO: 42842 - DNA, 15 bp, Homo sapiens
cacaccttgaacaca

SEQ ID NO: 42843 - DNA, 15 bp, Homo sapiens
acaccttgaacacaa

SEQ ID NO: 42844 - DNA, 15 bp, Homo sapiens
caccttgaacacaag

SEQ ID NO: 42845 - DNA, 15 bp, Homo sapiens
accttgaacacaagc

SEQ ID NO: 42846 - DNA, 15 bp, Homo sapiens
ccttgaacacaagct

SEQ ID NO: 42847 - DNA, 15 bp, Homo sapiens
cttgaacacaagctc

SEQ ID NO: 42848 - DNA, 15 bp, Homo sapiens
ttgaacacaagctca

SEQ ID NO: 42849 - DNA, 15 bp, Homo sapiens
tgaacacaagctcat

SEQ ID NO: 42850 - DNA, 15 bp, Homo sapiens
gaacacaagctcatc

SEQ ID NO: 42851 - DNA, 15 bp, Homo sapiens
aacacaagctcatca

SEQ ID NO: 42852 - DNA, 15 bp, Homo sapiens
acacaagctcatcag

SEQ ID NO: 42853 - DNA, 15 bp, Homo sapiens
cacaagctcatcagt

SEQ ID NO: 42854 - DNA, 15 bp, Homo sapiens
acaagctcatcagtc

SEQ ID NO: 42855 - DNA, 15 bp, Homo sapiens
caagctcatcagtca

SEQ ID NO: 42856 - DNA, 15 bp, Homo sapiens
aagctcatcagtcac

SEQ ID NO: 42857 - DNA, 15 bp, Homo sapiens
agctcatcagtcacc

SEQ ID NO: 42858 - DNA, 15 bp, Homo sapiens
gctcatcagtcaccg

SEQ ID NO: 42859 - DNA, 15 bp, Homo sapiens
ctcatcagtcaccgc

SEQ ID NO: 42860 - DNA, 15 bp, Homo sapiens
tcatcagtcaccgca

SEQ ID NO: 42861 - DNA, 15 bp, Homo sapiens
catcagtcaccgcaa

SEQ ID NO: 42862 - DNA, 15 bp, Homo sapiens
atcagtcaccgcaaa

SEQ ID NO: 42863 - DNA, 15 bp, Homo sapiens
tcagtcaccgcaaac

SEQ ID NO: 42864 - DNA, 15 bp, Homo sapiens
cagtcaccgcaaacg

SEQ ID NO: 42865 - DNA, 15 bp, Homo sapiens
agtcaccgcaaacgt

SEQ ID NO: 42866 - DNA, 15 bp, Homo sapiens
gtcaccgcaaacgtc

SEQ ID NO: 42867 - DNA, 15 bp, Homo sapiens
tcaccgcaaacgtcc

SEQ ID NO: 42868 - DNA, 15 bp, Homo sapiens
caccgcaaacgtccg

SEQ ID NO: 42869 - DNA, 15 bp, Homo sapiens
accgcaaacgtccgg

SEQ ID NO: 42870 - DNA, 15 bp, Homo sapiens
ccgcaaacgtccggt

SEQ ID NO: 42871 - DNA, 15 bp, Homo sapiens
cgcaaacgtccggtc

SEQ ID NO: 42872 - DNA, 15 bp, Homo sapiens
gcaaacgtccggtcc

SEQ ID NO: 42873 - DNA, 15 bp, Homo sapiens
caaacgtccggtcca

SEQ ID NO: 42874 - DNA, 15 bp, Homo sapiens
aaacgtccggtccag

SEQ ID NO: 42875 - DNA, 15 bp, Homo sapiens
aacgtccggtccagc

SEQ ID NO: 42876 - DNA, 15 bp, Homo sapiens
acgtccggtccagct

SEQ ID NO: 42877 - DNA, 15 bp, Homo sapiens
cgtccggtccagctt

SEQ ID NO: 42878 - DNA, 15 bp, Homo sapiens
gtccggtccagcttc

SEQ ID NO: 42879 - DNA, 15 bp, Homo sapiens
tccggtccagcttcc

SEQ ID NO: 42880 - DNA, 15 bp, Homo sapiens
ccggtccagcttccc

SEQ ID NO: 42881 - DNA, 15 bp, Homo sapiens
cggtccagcttccca

SEQ ID NO: 42882 - DNA, 15 bp, Homo sapiens
ggtccagcttcccag

SEQ ID NO: 42883 - DNA, 15 bp, Homo sapiens
gtccagcttcccaga

SEQ ID NO: 42884 - DNA, 15 bp, Homo sapiens
tccagcttcccagat

SEQ ID NO: 42885 - DNA, 15 bp, Homo sapiens
ccagcttcccagata

SEQ ID NO: 42886 - DNA, 15 bp, Homo sapiens
cagcttcccagatag

SEQ ID NO: 42887 - DNA, 15 bp, Homo sapiens
agcttcccagatagg

SEQ ID NO: 42888 - DNA, 15 bp, Homo sapiens
gcttcccagataggg

SEQ ID NO: 42889 - DNA, 15 bp, Homo sapiens
cttcccagataggga

SEQ ID NO: 42890 - DNA, 15 bp, Homo sapiens
ttcccagatagggag

SEQ ID NO: 42891 - DNA, 15 bp, Homo sapiens
tcccagatagggagt

SEQ ID NO: 42892 - DNA, 15 bp, Homo sapiens
cccagatagggagtt

SEQ ID NO: 42893 - DNA, 15 bp, Homo sapiens
ccagatagggagttg

SEQ ID NO: 42894 - DNA, 15 bp, Homo sapiens
cagatagggagttga

SEQ ID NO: 42895 - DNA, 15 bp, Homo sapiens
agatagggagttgat

SEQ ID NO: 42896 - DNA, 15 bp, Homo sapiens
gatagggagttgatt

SEQ ID NO: 42897 - DNA, 15 bp, Homo sapiens
atagggagttgattt

SEQ ID NO: 42898 - DNA, 15 bp, Homo sapiens
tagggagttgatttc

SEQ ID NO: 42899 - DNA, 15 bp, Homo sapiens
agggagttgatttcc

SEQ ID NO: 42900 - DNA, 15 bp, Homo sapiens
gggagttgatttcct

SEQ ID NO: 42901 - DNA, 15 bp, Homo sapiens
ggagttgatttcctt

SEQ ID NO: 42902 - DNA, 15 bp, Homo sapiens
gagttgatttccttc

SEQ ID NO: 42903 - DNA, 15 bp, Homo sapiens
agttgatttccttct

SEQ ID NO: 42904 - DNA, 15 bp, Homo sapiens
gttgatttccttctg

SEQ ID NO: 42905 - DNA, 15 bp, Homo sapiens
ttgatttccttctga

SEQ ID NO: 42906 - DNA, 15 bp, Homo sapiens
tgatttccttctgaa

SEQ ID NO: 42907 - DNA, 15 bp, Homo sapiens
gatttccttctgaag

SEQ ID NO: 42908 - DNA, 15 bp, Homo sapiens
atttccttctgaagc

SEQ ID NO: 42909 - DNA, 15 bp, Homo sapiens
tttccttctgaagct

SEQ ID NO: 42910 - DNA, 15 bp, Homo sapiens
ttccttctgaagctc

SEQ ID NO: 42911 - DNA, 15 bp, Homo sapiens
tccttctgaagctcc

SEQ ID NO: 42912 - DNA, 15 bp, Homo sapiens
ccttctgaagctcct

SEQ ID NO: 42913 - DNA, 15 bp, Homo sapiens
cttctgaagctcctt

SEQ ID NO: 42914 - DNA, 15 bp, Homo sapiens
ttctgaagctccttc

SEQ ID NO: 42915 - DNA, 15 bp, Homo sapiens
tctgaagctccttcg

SEQ ID NO: 42916 - DNA, 15 bp, Homo sapiens
ctgaagctccttcgt

SEQ ID NO: 42917 - DNA, 15 bp, Homo sapiens
tgaagctccttcgta

SEQ ID NO: 42918 - DNA, 15 bp, Homo sapiens
gaagctccttcgtat

SEQ ID NO: 42919 - DNA, 15 bp, Homo sapiens
aagctccttcgtatc

SEQ ID NO: 42920 - DNA, 15 bp, Homo sapiens
agctccttcgtatca

SEQ ID NO: 42921 - DNA, 15 bp, Homo sapiens
gctccttcgtatcag

SEQ ID NO: 42922 - DNA, 15 bp, Homo sapiens
ctccttcgtatcaga

SEQ ID NO: 42923 - DNA, 15 bp, Homo sapiens
tccttcgtatcagac

SEQ ID NO: 42924 - DNA, 15 bp, Homo sapiens
ccttcgtatcagaca

SEQ ID NO: 42925 - DNA, 15 bp, Homo sapiens
cttcgtatcagacaa

SEQ ID NO: 42926 - DNA, 15 bp, Homo sapiens
ttcgtatcagacaag

SEQ ID NO: 42927 - DNA, 15 bp, Homo sapiens
tcgtatcagacaaga

SEQ ID NO: 42928 - DNA, 15 bp, Homo sapiens
cgtatcagacaagat

SEQ ID NO: 42929 - DNA, 15 bp, Homo sapiens
gtatcagacaagatc

SEQ ID NO: 42930 - DNA, 15 bp, Homo sapiens
tatcagacaagatct

SEQ ID NO: 42931 - DNA, 15 bp, Homo sapiens
atcagacaagatctg

SEQ ID NO: 42932 - DNA, 15 bp, Homo sapiens
tcagacaagatctgg

SEQ ID NO: 42933 - DNA, 15 bp, Homo sapiens
cagacaagatctggc

SEQ ID NO: 42934 - DNA, 15 bp, Homo sapiens
agacaagatctggca

SEQ ID NO: 42935 - DNA, 15 bp, Homo sapiens
gacaagatctggcag

SEQ ID NO: 42936 - DNA, 15 bp, Homo sapiens
acaagatctggcaga

SEQ ID NO: 42937 - DNA, 15 bp, Homo sapiens
caagatctggcagac

SEQ ID NO: 42938 - DNA, 15 bp, Homo sapiens
aagatctggcagaca

SEQ ID NO: 42939 - DNA, 15 bp, Homo sapiens
agatctggcagacac

SEQ ID NO: 42940 - DNA, 15 bp, Homo sapiens
gatctggcagacacc

SEQ ID NO: 42941 - DNA, 15 bp, Homo sapiens
atctggcagacacca

SEQ ID NO: 42942 - DNA, 15 bp, Homo sapiens
tctggcagacaccat

SEQ ID NO: 42943 - DNA, 15 bp, Homo sapiens
ctggcagacaccatg

SEQ ID NO: 42944 - DNA, 15 bp, Homo sapiens
tggcagacaccatgg

SEQ ID NO: 42945 - DNA, 15 bp, Homo sapiens
ggcagacaccatggc

SEQ ID NO: 42946 - DNA, 15 bp, Homo sapiens
gcagacaccatggca

SEQ ID NO: 42947 - DNA, 15 bp, Homo sapiens
cagacaccatggcag

SEQ ID NO: 42948 - DNA, 15 bp, Homo sapiens
agacaccatggcagc

SEQ ID NO: 42949 - DNA, 15 bp, Homo sapiens
gacaccatggcagcc

SEQ ID NO: 42950 - DNA, 15 bp, Homo sapiens
acaccatggcagcca

SEQ ID NO: 42951 - DNA, 15 bp, Homo sapiens
caccatggcagccat

SEQ ID NO: 42952 - DNA, 15 bp, Homo sapiens
accatggcagccatg

SEQ ID NO: 42953 - DNA, 15 bp, Homo sapiens
ccatggcagccatga

SEQ ID NO: 42954 - DNA, 15 bp, Homo sapiens
catggcagccatgag

SEQ ID NO: 42955 - DNA, 15 bp, Homo sapiens
atggcagccatgagc

SEQ ID NO: 42956 - DNA, 15 bp, Homo sapiens
tggcagccatgagcc

SEQ ID NO: 42957 - DNA, 15 bp, Homo sapiens
ggcagccatgagccc

SEQ ID NO: 42958 - DNA, 15 bp, Homo sapiens
gcagccatgagcccc

SEQ ID NO: 42959 - DNA, 15 bp, Homo sapiens
cagccatgagcccct

SEQ ID NO: 42960 - DNA, 15 bp, Homo sapiens
agccatgagcccctg

SEQ ID NO: 42961 - DNA, 15 bp, Homo sapiens
gccatgagcccctgc

SEQ ID NO: 42962 - DNA, 15 bp, Homo sapiens
ccatgagcccctgcc

SEQ ID NO: 42963 - DNA, 15 bp, Homo sapiens
catgagcccctgcct

SEQ ID NO: 42964 - DNA, 15 bp, Homo sapiens
atgagcccctgcctg

SEQ ID NO: 42965 - DNA, 15 bp, Homo sapiens
tgagcccctgcctgg

SEQ ID NO: 42966 - DNA, 15 bp, Homo sapiens
gagcccctgcctggg

SEQ ID NO: 42967 - DNA, 15 bp, Homo sapiens
agcccctgcctgggg

SEQ ID NO: 42968 - DNA, 15 bp, Homo sapiens
gcccctgcctggggc

SEQ ID NO: 42969 - DNA, 15 bp, Homo sapiens
cccctgcctggggca

SEQ ID NO: 42970 - DNA, 15 bp, Homo sapiens
ccctgcctggggcag

SEQ ID NO: 42971 - DNA, 15 bp, Homo sapiens
cctgcctggggcagg

SEQ ID NO: 42972 - DNA, 15 bp, Homo sapiens
ctgcctggggcaggc

SEQ ID NO: 42973 - DNA, 15 bp, Homo sapiens
tgcctggggcaggct

SEQ ID NO: 42974 - DNA, 15 bp, Homo sapiens
gcctggggcaggctg

SEQ ID NO: 42975 - DNA, 15 bp, Homo sapiens
cctggggcaggctgg

SEQ ID NO: 42976 - DNA, 15 bp, Homo sapiens
ctggggcaggctggc

SEQ ID NO: 42977 - DNA, 15 bp, Homo sapiens
tggggcaggctggct

SEQ ID NO: 42978 - DNA, 15 bp, Homo sapiens
ggggcaggctggcta

SEQ ID NO: 42979 - DNA, 15 bp, Homo sapiens
gggcaggctggctag

SEQ ID NO: 42980 - DNA, 15 bp, Homo sapiens
ggcaggctggctagc

SEQ ID NO: 42981 - DNA, 15 bp, Homo sapiens
gcaggctggctagca

SEQ ID NO: 42982 - DNA, 15 bp, Homo sapiens
caggctggctagcag

SEQ ID NO: 42983 - DNA, 15 bp, Homo sapiens
aggctggctagcagt

SEQ ID NO: 42984 - DNA, 15 bp, Homo sapiens
ggctggctagcagtg

SEQ ID NO: 42985 - DNA, 15 bp, Homo sapiens
gctggctagcagtgg

SEQ ID NO: 42986 - DNA, 15 bp, Homo sapiens
ctggctagcagtgga

SEQ ID NO: 42987 - DNA, 15 bp, Homo sapiens
tggctagcagtggag

SEQ ID NO: 42988 - DNA, 15 bp, Homo sapiens
ggctagcagtggagg

SEQ ID NO: 42989 - DNA, 15 bp, Homo sapiens
gctagcagtggaggg

SEQ ID NO: 42990 - DNA, 15 bp, Homo sapiens
ctagcagtggagggt

SEQ ID NO: 42991 - DNA, 15 bp, Homo sapiens
tagcagtggagggtc

SEQ ID NO: 42992 - DNA, 15 bp, Homo sapiens
agcagtggagggtcc

SEQ ID NO: 42993 - DNA, 15 bp, Homo sapiens
gcagtggagggtcct

SEQ ID NO: 42994 - DNA, 15 bp, Homo sapiens
cagtggagggtcctc

SEQ ID NO: 42995 - DNA, 15 bp, Homo sapiens
agtggagggtcctca

SEQ ID NO: 42996 - DNA, 15 bp, Homo sapiens
gtggagggtcctcat

SEQ ID NO: 42997 - DNA, 15 bp, Homo sapiens
tggagggtcctcatg

SEQ ID NO: 42998 - DNA, 15 bp, Homo sapiens
ggagggtcctcatgt

SEQ ID NO: 42999 - DNA, 15 bp, Homo sapiens
gagggtcctcatgtg

SEQ ID NO: 43000 - DNA, 15 bp, Homo sapiens
agggtcctcatgtgt

SEQ ID NO: 43001 - DNA, 15 bp, Homo sapiens
gggtcctcatgtgta

SEQ ID NO: 43002 - DNA, 15 bp, Homo sapiens
ggtcctcatgtgtac

SEQ ID NO: 43003 - DNA, 15 bp, Homo sapiens
gtcctcatgtgtacc

SEQ ID NO: 43004 - DNA, 15 bp, Homo sapiens
tcctcatgtgtacca

SEQ ID NO: 43005 - DNA, 15 bp, Homo sapiens
cctcatgtgtaccag

SEQ ID NO: 43006 - DNA, 15 bp, Homo sapiens
ctcatgtgtaccaga

SEQ ID NO: 43007 - DNA, 15 bp, Homo sapiens
tcatgtgtaccagac

SEQ ID NO: 43008 - DNA, 15 bp, Homo sapiens
catgtgtaccagaca

SEQ ID NO: 43009 - DNA, 15 bp, Homo sapiens
atgtgtaccagacag

SEQ ID NO: 43010 - DNA, 15 bp, Homo sapiens
tgtgtaccagacagg

SEQ ID NO: 43011 - DNA, 15 bp, Homo sapiens
gtgtaccagacaggg

SEQ ID NO: 43012 - DNA, 15 bp, Homo sapiens
tgtaccagacaggga

SEQ ID NO: 43013 - DNA, 15 bp, Homo sapiens
gtaccagacagggac

SEQ ID NO: 43014 - DNA, 15 bp, Homo sapiens
taccagacagggact

SEQ ID NO: 43015 - DNA, 15 bp, Homo sapiens
accagacagggactg

SEQ ID NO: 43016 - DNA, 15 bp, Homo sapiens
ccagacagggactgt

SEQ ID NO: 43017 - DNA, 15 bp, Homo sapiens
cagacagggactgtg

SEQ ID NO: 43018 - DNA, 15 bp, Homo sapiens
agacagggactgtgt

SEQ ID NO: 43019 - DNA, 15 bp, Homo sapiens
gacagggactgtgtc

SEQ ID NO: 43020 - DNA, 15 bp, Homo sapiens
acagggactgtgtca

SEQ ID NO: 43021 - DNA, 15 bp, Homo sapiens
cagggactgtgtcac

SEQ ID NO: 43022 - DNA, 15 bp, Homo sapiens
agggactgtgtcact

SEQ ID NO: 43023 - DNA, 15 bp, Homo sapiens
gggactgtgtcactg

SEQ ID NO: 43024 - DNA, 15 bp, Homo sapiens
ggactgtgtcactgt

SEQ ID NO: 43025 - DNA, 15 bp, Homo sapiens
gactgtgtcactgtg

SEQ ID NO: 43026 - DNA, 15 bp, Homo sapiens
actgtgtcactgtgt

SEQ ID NO: 43027 - DNA, 15 bp, Homo sapiens
ctgtgtcactgtgtc

SEQ ID NO: 43028 - DNA, 15 bp, Homo sapiens
tgtgtcactgtgtca

SEQ ID NO: 43029 - DNA, 15 bp, Homo sapiens
gtgtcactgtgtcag

SEQ ID NO: 43030 - DNA, 15 bp, Homo sapiens
tgtcactgtgtcagg

SEQ ID NO: 43031 - DNA, 15 bp, Homo sapiens
gtcactgtgtcaggg

SEQ ID NO: 43032 - DNA, 15 bp, Homo sapiens
tcactgtgtcagggg

SEQ ID NO: 43033 - DNA, 15 bp, Homo sapiens
cactgtgtcaggggt

SEQ ID NO: 43034 - DNA, 15 bp, Homo sapiens
actgtgtcaggggtg

SEQ ID NO: 43035 - DNA, 15 bp, Homo sapiens
ctgtgtcaggggtga

SEQ ID NO: 43036 - DNA, 15 bp, Homo sapiens
tgtgtcaggggtgac

SEQ ID NO: 43037 - DNA, 15 bp, Homo sapiens
gtgtcaggggtgact

SEQ ID NO: 43038 - DNA, 15 bp, Homo sapiens
tgtcaggggtgactg

SEQ ID NO: 43039 - DNA, 15 bp, Homo sapiens
gtcaggggtgactgg

SEQ ID NO: 43040 - DNA, 15 bp, Homo sapiens
tcaggggtgactggg

SEQ ID NO: 43041 - DNA, 15 bp, Homo sapiens
caggggtgactggga

SEQ ID NO: 43042 - DNA, 15 bp, Homo sapiens
aggggtgactgggat

SEQ ID NO: 43043 - DNA, 15 bp, Homo sapiens
ggggtgactgggatg

SEQ ID NO: 43044 - DNA, 15 bp, Homo sapiens
gggtgactgggatgg

SEQ ID NO: 43045 - DNA, 15 bp, Homo sapiens
ggtgactgggatgga

SEQ ID NO: 43046 - DNA, 15 bp, Homo sapiens
gtgactgggatggat

SEQ ID NO: 43047 - DNA, 15 bp, Homo sapiens
tgactgggatggatt

SEQ ID NO: 43048 - DNA, 15 bp, Homo sapiens
gactgggatggattg

SEQ ID NO: 43049 - DNA, 15 bp, Homo sapiens
actgggatggattgt

SEQ ID NO: 43050 - DNA, 15 bp, Homo sapiens
ctgggatggattgtg

SEQ ID NO: 43051 - DNA, 15 bp, Homo sapiens
tgggatggattgtgt

SEQ ID NO: 43052 - DNA, 15 bp, Homo sapiens
gggatggattgtgtg

SEQ ID NO: 43053 - DNA, 15 bp, Homo sapiens
ggatggattgtgtgt

SEQ ID NO: 43054 - DNA, 15 bp, Homo sapiens
gatggattgtgtgtg

SEQ ID NO: 43055 - DNA, 15 bp, Homo sapiens
atggattgtgtgtga

SEQ ID NO: 43056 - DNA, 15 bp, Homo sapiens
tggattgtgtgtgac

SEQ ID NO: 43057 - DNA, 15 bp, Homo sapiens
ggattgtgtgtgact

SEQ ID NO: 43058 - DNA, 15 bp, Homo sapiens
gattgtgtgtgacta

SEQ ID NO: 43059 - DNA, 15 bp, Homo sapiens
attgtgtgtgactat

SEQ ID NO: 43060 - DNA, 15 bp, Homo sapiens
ttgtgtgtgactatt

SEQ ID NO: 43061 - DNA, 15 bp, Homo sapiens
tgtgtgtgactattc

SEQ ID NO: 43062 - DNA, 15 bp, Homo sapiens
gtgtgtgactattct

SEQ ID NO: 43063 - DNA, 15 bp, Homo sapiens
tgtgtgactattctg

SEQ ID NO: 43064 - DNA, 15 bp, Homo sapiens
gtgtgactattctgt

SEQ ID NO: 43065 - DNA, 15 bp, Homo sapiens
tgtgactattctgtg

SEQ ID NO: 43066 - DNA, 15 bp, Homo sapiens
gtgactattctgtgt

SEQ ID NO: 43067 - DNA, 15 bp, Homo sapiens
tgactattctgtgtt

SEQ ID NO: 43068 - DNA, 15 bp, Homo sapiens
gactattctgtgtta

SEQ ID NO: 43069 - DNA, 15 bp, Homo sapiens
actattctgtgttag

SEQ ID NO: 43070 - DNA, 15 bp, Homo sapiens
ctattctgtgttaga

SEQ ID NO: 43071 - DNA, 15 bp, Homo sapiens
tattctgtgttagag

SEQ ID NO: 43072 - DNA, 15 bp, Homo sapiens
attctgtgttagagt

SEQ ID NO: 43073 - DNA, 15 bp, Homo sapiens
ttctgtgttagagtg

SEQ ID NO: 43074 - DNA, 15 bp, Homo sapiens
tctgtgttagagtgt

SEQ ID NO: 43075 - DNA, 15 bp, Homo sapiens
ctgtgttagagtgtg

SEQ ID NO: 43076 - DNA, 15 bp, Homo sapiens
tgtgttagagtgtga

SEQ ID NO: 43077 - DNA, 15 bp, Homo sapiens
gtgttagagtgtgac

SEQ ID NO: 43078 - DNA, 15 bp, Homo sapiens
tgttagagtgtgact

SEQ ID NO: 43079 - DNA, 15 bp, Homo sapiens
gttagagtgtgactg

SEQ ID NO: 43080 - DNA, 15 bp, Homo sapiens
ttagagtgtgactgg

SEQ ID NO: 43081 - DNA, 15 bp, Homo sapiens
tagagtgtgactgga

SEQ ID NO: 43082 - DNA, 15 bp, Homo sapiens
agagtgtgactggac

SEQ ID NO: 43083 - DNA, 15 bp, Homo sapiens
gagtgtgactggaca

SEQ ID NO: 43084 - DNA, 15 bp, Homo sapiens
agtgtgactggacag

SEQ ID NO: 43085 - DNA, 15 bp, Homo sapiens
gtgtgactggacagc

SEQ ID NO: 43086 - DNA, 15 bp, Homo sapiens
tgtgactggacagct

SEQ ID NO: 43087 - DNA, 15 bp, Homo sapiens
gtgactggacagctc

SEQ ID NO: 43088 - DNA, 15 bp, Homo sapiens
tgactggacagctct

SEQ ID NO: 43089 - DNA, 15 bp, Homo sapiens
gactggacagctctg

SEQ ID NO: 43090 - DNA, 15 bp, Homo sapiens
actggacagctctgc

SEQ ID NO: 43091 - DNA, 15 bp, Homo sapiens
ctggacagctctgcc

SEQ ID NO: 43092 - DNA, 15 bp, Homo sapiens
tggacagctctgcct

SEQ ID NO: 43093 - DNA, 15 bp, Homo sapiens
ggacagctctgcctg

SEQ ID NO: 43094 - DNA, 15 bp, Homo sapiens
gacagctctgcctga

SEQ ID NO: 43095 - DNA, 15 bp, Homo sapiens
acagctctgcctgag

SEQ ID NO: 43096 - DNA, 15 bp, Homo sapiens
cagctctgcctgagg

SEQ ID NO: 43097 - DNA, 15 bp, Homo sapiens
agctctgcctgaggg

SEQ ID NO: 43098 - DNA, 15 bp, Homo sapiens
gctctgcctgagggt

SEQ ID NO: 43099 - DNA, 15 bp, Homo sapiens
ctctgcctgagggtg

SEQ ID NO: 43100 - DNA, 15 bp, Homo sapiens
tctgcctgagggtgt

SEQ ID NO: 43101 - DNA, 15 bp, Homo sapiens
ctgcctgagggtgtg

SEQ ID NO: 43102 - DNA, 15 bp, Homo sapiens
tgcctgagggtgtga

SEQ ID NO: 43103 - DNA, 15 bp, Homo sapiens
gcctgagggtgtgag

SEQ ID NO: 43104 - DNA, 15 bp, Homo sapiens
cctgagggtgtgagg

SEQ ID NO: 43105 - DNA, 15 bp, Homo sapiens
ctgagggtgtgaggt

SEQ ID NO: 43106 - DNA, 15 bp, Homo sapiens
tgagggtgtgaggtc

SEQ ID NO: 43107 - DNA, 15 bp, Homo sapiens
gagggtgtgaggtcc

SEQ ID NO: 43108 - DNA, 15 bp, Homo sapiens
agggtgtgaggtccc

SEQ ID NO: 43109 - DNA, 15 bp, Homo sapiens
gggtgtgaggtccct

SEQ ID NO: 43110 - DNA, 15 bp, Homo sapiens
ggtgtgaggtccctg

SEQ ID NO: 43111 - DNA, 15 bp, Homo sapiens
gtgtgaggtccctgt

SEQ ID NO: 43112 - DNA, 15 bp, Homo sapiens
tgtgaggtccctgtg

SEQ ID NO: 43113 - DNA, 15 bp, Homo sapiens
gtgaggtccctgtgc

SEQ ID NO: 43114 - DNA, 15 bp, Homo sapiens
tgaggtccctgtgcg

SEQ ID NO: 43115 - DNA, 15 bp, Homo sapiens
gaggtccctgtgcgg

SEQ ID NO: 43116 - DNA, 15 bp, Homo sapiens
aggtccctgtgcggc

SEQ ID NO: 43117 - DNA, 15 bp, Homo sapiens
ggtccctgtgcggcc

SEQ ID NO: 43118 - DNA, 15 bp, Homo sapiens
gtccctgtgcggcca

SEQ ID NO: 43119 - DNA, 15 bp, Homo sapiens
tccctgtgcggccac

SEQ ID NO: 43120 - DNA, 15 bp, Homo sapiens
ccctgtgcggccaca

SEQ ID NO: 43121 - DNA, 15 bp, Homo sapiens
cctgtgcggccacac

SEQ ID NO: 43122 - DNA, 15 bp, Homo sapiens
ctgtgcggccacact

SEQ ID NO: 43123 - DNA, 15 bp, Homo sapiens
tgtgcggccacacta

SEQ ID NO: 43124 - DNA, 15 bp, Homo sapiens
gtgcggccacactat

SEQ ID NO: 43125 - DNA, 15 bp, Homo sapiens
tgcggccacactatg

SEQ ID NO: 43126 - DNA, 15 bp, Homo sapiens
gcggccacactatgc

SEQ ID NO: 43127 - DNA, 15 bp, Homo sapiens
cggccacactatgcc

SEQ ID NO: 43128 - DNA, 15 bp, Homo sapiens
ggccacactatgcct

SEQ ID NO: 43129 - DNA, 15 bp, Homo sapiens
gccacactatgcctg

SEQ ID NO: 43130 - DNA, 15 bp, Homo sapiens
ccacactatgcctga

SEQ ID NO: 43131 - DNA, 15 bp, Homo sapiens
cacactatgcctgac

SEQ ID NO: 43132 - DNA, 15 bp, Homo sapiens
acactatgcctgaca

SEQ ID NO: 43133 - DNA, 15 bp, Homo sapiens
cactatgcctgacag

SEQ ID NO: 43134 - DNA, 15 bp, Homo sapiens
actatgcctgacagc

SEQ ID NO: 43135 - DNA, 15 bp, Homo sapiens
ctatgcctgacagcc

SEQ ID NO: 43136 - DNA, 15 bp, Homo sapiens
tatgcctgacagccc

SEQ ID NO: 43137 - DNA, 15 bp, Homo sapiens
atgcctgacagccca

SEQ ID NO: 43138 - DNA, 15 bp, Homo sapiens
tgcctgacagcccac

SEQ ID NO: 43139 - DNA, 15 bp, Homo sapiens
gcctgacagcccaca

SEQ ID NO: 43140 - DNA, 15 bp, Homo sapiens
cctgacagcccacat

SEQ ID NO: 43141 - DNA, 15 bp, Homo sapiens
ctgacagcccacatg

SEQ ID NO: 43142 - DNA, 15 bp, Homo sapiens
tgacagcccacatga

SEQ ID NO: 43143 - DNA, 15 bp, Homo sapiens
gacagcccacatgac

SEQ ID NO: 43144 - DNA, 15 bp, Homo sapiens
acagcccacatgacc

SEQ ID NO: 43145 - DNA, 15 bp, Homo sapiens
cagcccacatgaccc

SEQ ID NO: 43146 - DNA, 15 bp, Homo sapiens
agcccacatgaccca

SEQ ID NO: 43147 - DNA, 15 bp, Homo sapiens
gcccacatgacccac

SEQ ID NO: 43148 - DNA, 15 bp, Homo sapiens
cccacatgacccacc

SEQ ID NO: 43149 - DNA, 15 bp, Homo sapiens
ccacatgacccaccc

SEQ ID NO: 43150 - DNA, 15 bp, Homo sapiens
cacatgacccaccct

SEQ ID NO: 43151 - DNA, 15 bp, Homo sapiens
acatgacccaccctc

SEQ ID NO: 43152 - DNA, 15 bp, Homo sapiens
catgacccaccctcc

SEQ ID NO: 43153 - DNA, 15 bp, Homo sapiens
atgacccaccctcca

SEQ ID NO: 43154 - DNA, 15 bp, Homo sapiens
tgacccaccctccat

SEQ ID NO: 43155 - DNA, 15 bp, Homo sapiens
gacccaccctccatg

SEQ ID NO: 43156 - DNA, 15 bp, Homo sapiens
acccaccctccatgg

SEQ ID NO: 43157 - DNA, 15 bp, Homo sapiens
cccaccctccatggc

SEQ ID NO: 43158 - DNA, 15 bp, Homo sapiens
ccaccctccatggcc

SEQ ID NO: 43159 - DNA, 15 bp, Homo sapiens
caccctccatggccc

SEQ ID NO: 43160 - DNA, 15 bp, Homo sapiens
accctccatggccct

SEQ ID NO: 43161 - DNA, 15 bp, Homo sapiens
ccctccatggccctg

SEQ ID NO: 43162 - DNA, 15 bp, Homo sapiens
cctccatggccctgg

SEQ ID NO: 43163 - DNA, 15 bp, Homo sapiens
ctccatggccctggc

SEQ ID NO: 43164 - DNA, 15 bp, Homo sapiens
tccatggccctggca

SEQ ID NO: 43165 - DNA, 15 bp, Homo sapiens
ccatggccctggcag

SEQ ID NO: 43166 - DNA, 15 bp, Homo sapiens
catggccctggcagt

SEQ ID NO: 43167 - DNA, 15 bp, Homo sapiens
atggccctggcagtg

SEQ ID NO: 43168 - DNA, 15 bp, Homo sapiens
tggccctggcagtgt

SEQ ID NO: 43169 - DNA, 15 bp, Homo sapiens
ggccctggcagtgta

SEQ ID NO: 43170 - DNA, 15 bp, Homo sapiens
gccctggcagtgtac

SEQ ID NO: 43171 - DNA, 15 bp, Homo sapiens
ccctggcagtgtacc

SEQ ID NO: 43172 - DNA, 15 bp, Homo sapiens
cctggcagtgtacct

SEQ ID NO: 43173 - DNA, 15 bp, Homo sapiens
ctggcagtgtacctt

SEQ ID NO: 43174 - DNA, 15 bp, Homo sapiens
tggcagtgtaccttg

SEQ ID NO: 43175 - DNA, 15 bp, Homo sapiens
ggcagtgtaccttgg

SEQ ID NO: 43176 - DNA, 15 bp, Homo sapiens
gcagtgtaccttggt

SEQ ID NO: 43177 - DNA, 15 bp, Homo sapiens
cagtgtaccttggtg

SEQ ID NO: 43178 - DNA, 15 bp, Homo sapiens
agtgtaccttggtga

SEQ ID NO: 43179 - DNA, 15 bp, Homo sapiens
gtgtaccttggtgat

SEQ ID NO: 43180 - DNA, 15 bp, Homo sapiens
tgtaccttggtgatc

SEQ ID NO: 43181 - DNA, 15 bp, Homo sapiens
gtaccttggtgatct

SEQ ID NO: 43182 - DNA, 15 bp, Homo sapiens
taccttggtgatctc

SEQ ID NO: 43183 - DNA, 15 bp, Homo sapiens
accttggtgatctct

SEQ ID NO: 43184 - DNA, 15 bp, Homo sapiens
ccttggtgatctctt

SEQ ID NO: 43185 - DNA, 15 bp, Homo sapiens
cttggtgatctcttc

SEQ ID NO: 43186 - DNA, 15 bp, Homo sapiens
ttggtgatctcttcc

SEQ ID NO: 43187 - DNA, 15 bp, Homo sapiens
tggtgatctcttcct

SEQ ID NO: 43188 - DNA, 15 bp, Homo sapiens
ggtgatctcttcctt

SEQ ID NO: 43189 - DNA, 15 bp, Homo sapiens
gtgatctcttccttc

SEQ ID NO: 43190 - DNA, 15 bp, Homo sapiens
tgatctcttccttct

SEQ ID NO: 43191 - DNA, 15 bp, Homo sapiens
gatctcttccttctg

SEQ ID NO: 43192 - DNA, 15 bp, Homo sapiens
atctcttccttctgc

SEQ ID NO: 43193 - DNA, 15 bp, Homo sapiens
tctcttccttctgct

SEQ ID NO: 43194 - DNA, 15 bp, Homo sapiens
ctcttccttctgctt

SEQ ID NO: 43195 - DNA, 15 bp, Homo sapiens
tcttccttctgcttc

SEQ ID NO: 43196 - DNA, 15 bp, Homo sapiens
cttccttctgcttcc

SEQ ID NO: 43197 - DNA, 15 bp, Homo sapiens
ttccttctgcttccg

SEQ ID NO: 43198 - DNA, 15 bp, Homo sapiens
tccttctgcttccgg

SEQ ID NO: 43199 - DNA, 15 bp, Homo sapiens
ccttctgcttccgga

SEQ ID NO: 43200 - DNA, 15 bp, Homo sapiens
cttctgcttccggat

SEQ ID NO: 43201 - DNA, 15 bp, Homo sapiens
ttctgcttccggatg

SEQ ID NO: 43202 - DNA, 15 bp, Homo sapiens
tctgcttccggatgt

SEQ ID NO: 43203 - DNA, 15 bp, Homo sapiens
ctgcttccggatgtt

SEQ ID NO: 43204 - DNA, 15 bp, Homo sapiens
tgcttccggatgttg

SEQ ID NO: 43205 - DNA, 15 bp, Homo sapiens
gcttccggatgttgc

SEQ ID NO: 43206 - DNA, 15 bp, Homo sapiens
cttccggatgttgcc

SEQ ID NO: 43207 - DNA, 15 bp, Homo sapiens
ttccggatgttgccc

SEQ ID NO: 43208 - DNA, 15 bp, Homo sapiens
tccggatgttgccca

SEQ ID NO: 43209 - DNA, 15 bp, Homo sapiens
ccggatgttgcccac

SEQ ID NO: 43210 - DNA, 15 bp, Homo sapiens
cggatgttgcccacg

SEQ ID NO: 43211 - DNA, 15 bp, Homo sapiens
ggatgttgcccacga

SEQ ID NO: 43212 - DNA, 15 bp, Homo sapiens
gatgttgcccacgat

SEQ ID NO: 43213 - DNA, 15 bp, Homo sapiens
atgttgcccacgatc

SEQ ID NO: 43214 - DNA, 15 bp, Homo sapiens
tgttgcccacgatct

SEQ ID NO: 43215 - DNA, 15 bp, Homo sapiens
gttgcccacgatctc

SEQ ID NO: 43216 - DNA, 15 bp, Homo sapiens
ttgcccacgatctcc

SEQ ID NO: 43217 - DNA, 15 bp, Homo sapiens
tgcccacgatctcca

SEQ ID NO: 43218 - DNA, 15 bp, Homo sapiens
gcccacgatctccag

SEQ ID NO: 43219 - DNA, 15 bp, Homo sapiens
cccacgatctccagg

SEQ ID NO: 43220 - DNA, 15 bp, Homo sapiens
ccacgatctccagga

SEQ ID NO: 43221 - DNA, 15 bp, Homo sapiens
cacgatctccaggat

SEQ ID NO: 43222 - DNA, 15 bp, Homo sapiens
acgatctccaggatg

SEQ ID NO: 43223 - DNA, 15 bp, Homo sapiens
cgatctccaggatgc

SEQ ID NO: 43224 - DNA, 15 bp, Homo sapiens
gatctccaggatgcg

SEQ ID NO: 43225 - DNA, 15 bp, Homo sapiens
atctccaggatgcgc

SEQ ID NO: 43226 - DNA, 15 bp, Homo sapiens
tctccaggatgcgct

SEQ ID NO: 43227 - DNA, 15 bp, Homo sapiens
ctccaggatgcgctg

SEQ ID NO: 43228 - DNA, 15 bp, Homo sapiens
tccaggatgcgctgg

SEQ ID NO: 43229 - DNA, 15 bp, Homo sapiens
ccaggatgcgctggg

SEQ ID NO: 43230 - DNA, 15 bp, Homo sapiens
caggatgcgctgggt

SEQ ID NO: 43231 - DNA, 15 bp, Homo sapiens
aggatgcgctgggtg

SEQ ID NO: 43232 - DNA, 15 bp, Homo sapiens
ggatgcgctgggtgt

SEQ ID NO: 43233 - DNA, 15 bp, Homo sapiens
gatgcgctgggtgta

SEQ ID NO: 43234 - DNA, 15 bp, Homo sapiens
atgcgctgggtgtag

SEQ ID NO: 43235 - DNA, 15 bp, Homo sapiens
tgcgctgggtgtagg

SEQ ID NO: 43236 - DNA, 15 bp, Homo sapiens
gcgctgggtgtaggc

SEQ ID NO: 43237 - DNA, 15 bp, Homo sapiens
cgctgggtgtaggcc

SEQ ID NO: 43238 - DNA, 15 bp, Homo sapiens
gctgggtgtaggcca

SEQ ID NO: 43239 - DNA, 15 bp, Homo sapiens
ctgggtgtaggccag

SEQ ID NO: 43240 - DNA, 15 bp, Homo sapiens
tgggtgtaggccagc

SEQ ID NO: 43241 - DNA, 15 bp, Homo sapiens
gggtgtaggccagcc

SEQ ID NO: 43242 - DNA, 15 bp, Homo sapiens
ggtgtaggccagccg

SEQ ID NO: 43243 - DNA, 15 bp, Homo sapiens
gtgtaggccagccgg

SEQ ID NO: 43244 - DNA, 15 bp, Homo sapiens
tgtaggccagccggg

SEQ ID NO: 43245 - DNA, 15 bp, Homo sapiens
gtaggccagccggga

SEQ ID NO: 43246 - DNA, 15 bp, Homo sapiens
taggccagccgggac

SEQ ID NO: 43247 - DNA, 15 bp, Homo sapiens
aggccagccgggaca

SEQ ID NO: 43248 - DNA, 15 bp, Homo sapiens
ggccagccgggacac

SEQ ID NO: 43249 - DNA, 15 bp, Homo sapiens
gccagccgggacaca

SEQ ID NO: 43250 - DNA, 15 bp, Homo sapiens
ccagccgggacacat

SEQ ID NO: 43251 - DNA, 15 bp, Homo sapiens
cagccgggacacatc

SEQ ID NO: 43252 - DNA, 15 bp, Homo sapiens
agccgggacacatct

SEQ ID NO: 43253 - DNA, 15 bp, Homo sapiens
gccgggacacatctc

SEQ ID NO: 43254 - DNA, 15 bp, Homo sapiens
ccgggacacatctct

SEQ ID NO: 43255 - DNA, 15 bp, Homo sapiens
cgggacacatctctg

SEQ ID NO: 43256 - DNA, 15 bp, Homo sapiens
gggacacatctctgg

SEQ ID NO: 43257 - DNA, 15 bp, Homo sapiens
ggacacatctctggg

SEQ ID NO: 43258 - DNA, 15 bp, Homo sapiens
gacacatctctgggc

SEQ ID NO: 43259 - DNA, 15 bp, Homo sapiens
acacatctctgggca

SEQ ID NO: 43260 - DNA, 15 bp, Homo sapiens
cacatctctgggcag

SEQ ID NO: 43261 - DNA, 15 bp, Homo sapiens
acatctctgggcaga

SEQ ID NO: 43262 - DNA, 15 bp, Homo sapiens
catctctgggcagag

SEQ ID NO: 43263 - DNA, 15 bp, Homo sapiens
atctctgggcagagt

SEQ ID NO: 43264 - DNA, 15 bp, Homo sapiens
tctctgggcagagtc

SEQ ID NO: 43265 - DNA, 15 bp, Homo sapiens
ctctgggcagagtct

SEQ ID NO: 43266 - DNA, 15 bp, Homo sapiens
tctgggcagagtctc

SEQ ID NO: 43267 - DNA, 15 bp, Homo sapiens
ctgggcagagtctcc

SEQ ID NO: 43268 - DNA, 15 bp, Homo sapiens
tgggcagagtctcca

SEQ ID NO: 43269 - DNA, 15 bp, Homo sapiens
gggcagagtctccag

SEQ ID NO: 43270 - DNA, 15 bp, Homo sapiens
ggcagagtctccagc

SEQ ID NO: 43271 - DNA, 15 bp, Homo sapiens
gcagagtctccagct

SEQ ID NO: 43272 - DNA, 15 bp, Homo sapiens
cagagtctccagctc

SEQ ID NO: 43273 - DNA, 15 bp, Homo sapiens
agagtctccagctct

SEQ ID NO: 43274 - DNA, 15 bp, Homo sapiens
gagtctccagctctg

SEQ ID NO: 43275 - DNA, 15 bp, Homo sapiens
agtctccagctctga

SEQ ID NO: 43276 - DNA, 15 bp, Homo sapiens
gtctccagctctgac

SEQ ID NO: 43277 - DNA, 15 bp, Homo sapiens
tctccagctctgaca

SEQ ID NO: 43278 - DNA, 15 bp, Homo sapiens
ctccagctctgacat

SEQ ID NO: 43279 - DNA, 15 bp, Homo sapiens
tccagctctgacatc

SEQ ID NO: 43280 - DNA, 15 bp, Homo sapiens
ccagctctgacatct

SEQ ID NO: 43281 - DNA, 15 bp, Homo sapiens
cagctctgacatcta

SEQ ID NO: 43282 - DNA, 15 bp, Homo sapiens
agctctgacatctag

SEQ ID NO: 43283 - DNA, 15 bp, Homo sapiens
gctctgacatctagg

SEQ ID NO: 43284 - DNA, 15 bp, Homo sapiens
ctctgacatctaggc

SEQ ID NO: 43285 - DNA, 15 bp, Homo sapiens
tctgacatctaggca

SEQ ID NO: 43286 - DNA, 15 bp, Homo sapiens
ctgacatctaggcag

SEQ ID NO: 43287 - DNA, 15 bp, Homo sapiens
tgacatctaggcagg

SEQ ID NO: 43288 - DNA, 15 bp, Homo sapiens
gacatctaggcaggg

SEQ ID NO: 43289 - DNA, 15 bp, Homo sapiens
acatctaggcaggga

SEQ ID NO: 43290 - DNA, 15 bp, Homo sapiens
catctaggcagggat

SEQ ID NO: 43291 - DNA, 15 bp, Homo sapiens
atctaggcagggata

SEQ ID NO: 43292 - DNA, 15 bp, Homo sapiens
tctaggcagggatat

SEQ ID NO: 43293 - DNA, 15 bp, Homo sapiens
ctaggcagggatata

SEQ ID NO: 43294 - DNA, 15 bp, Homo sapiens
taggcagggatatag

SEQ ID NO: 43295 - DNA, 15 bp, Homo sapiens
aggcagggatatagc

SEQ ID NO: 43296 - DNA, 15 bp, Homo sapiens
ggcagggatatagca

SEQ ID NO: 43297 - DNA, 15 bp, Homo sapiens
gcagggatatagcag

SEQ ID NO: 43298 - DNA, 15 bp, Homo sapiens
cagggatatagcagg

SEQ ID NO: 43299 - DNA, 15 bp, Homo sapiens
agggatatagcaggc

SEQ ID NO: 43300 - DNA, 15 bp, Homo sapiens
gggatatagcaggca

SEQ ID NO: 43301 - DNA, 15 bp, Homo sapiens
ggatatagcaggcac

SEQ ID NO: 43302 - DNA, 15 bp, Homo sapiens
gatatagcaggcact

SEQ ID NO: 43303 - DNA, 15 bp, Homo sapiens
atatagcaggcactg

SEQ ID NO: 43304 - DNA, 15 bp, Homo sapiens
tatagcaggcactgc

SEQ ID NO: 43305 - DNA, 15 bp, Homo sapiens
atagcaggcactgcc

SEQ ID NO: 43306 - DNA, 15 bp, Homo sapiens
tagcaggcactgccc

SEQ ID NO: 43307 - DNA, 15 bp, Homo sapiens
agcaggcactgcccc

SEQ ID NO: 43308 - DNA, 15 bp, Homo sapiens
gcaggcactgcccca

SEQ ID NO: 43309 - DNA, 15 bp, Homo sapiens
caggcactgccccag

SEQ ID NO: 43310 - DNA, 15 bp, Homo sapiens
aggcactgccccagg

SEQ ID NO: 43311 - DNA, 15 bp, Homo sapiens
ggcactgccccagga

SEQ ID NO: 43312 - DNA, 15 bp, Homo sapiens
gcactgccccaggac

SEQ ID NO: 43313 - DNA, 15 bp, Homo sapiens
cactgccccaggacc

SEQ ID NO: 43314 - DNA, 15 bp, Homo sapiens
actgccccaggacca

SEQ ID NO: 43315 - DNA, 15 bp, Homo sapiens
ctgccccaggaccat

SEQ ID NO: 43316 - DNA, 15 bp, Homo sapiens
tgccccaggaccatc

SEQ ID NO: 43317 - DNA, 15 bp, Homo sapiens
gccccaggaccatcc

SEQ ID NO: 43318 - DNA, 15 bp, Homo sapiens
ccccaggaccatccc

SEQ ID NO: 43319 - DNA, 15 bp, Homo sapiens
cccaggaccatcccc

SEQ ID NO: 43320 - DNA, 15 bp, Homo sapiens
ccaggaccatccccc

SEQ ID NO: 43321 - DNA, 15 bp, Homo sapiens
caggaccatcccccc

SEQ ID NO: 43322 - DNA, 15 bp, Homo sapiens
aggaccatcccccca

SEQ ID NO: 43323 - DNA, 15 bp, Homo sapiens
ggaccatccccccac

SEQ ID NO: 43324 - DNA, 15 bp, Homo sapiens
gaccatccccccacc

SEQ ID NO: 43325 - DNA, 15 bp, Homo sapiens
accatccccccaccc

SEQ ID NO: 43326 - DNA, 15 bp, Homo sapiens
ccatccccccaccct

SEQ ID NO: 43327 - DNA, 15 bp, Homo sapiens
catccccccaccctc

SEQ ID NO: 43328 - DNA, 15 bp, Homo sapiens
atccccccaccctcc

SEQ ID NO: 43329 - DNA, 15 bp, Homo sapiens
tccccccaccctcct

SEQ ID NO: 43330 - DNA, 15 bp, Homo sapiens
ccccccaccctccta

SEQ ID NO: 43331 - DNA, 15 bp, Homo sapiens
cccccaccctcctaa

SEQ ID NO: 43332 - DNA, 15 bp, Homo sapiens
ccccaccctcctaag

SEQ ID NO: 43333 - DNA, 15 bp, Homo sapiens
cccaccctcctaagc

SEQ ID NO: 43334 - DNA, 15 bp, Homo sapiens
ccaccctcctaagct

SEQ ID NO: 43335 - DNA, 15 bp, Homo sapiens
caccctcctaagcta

SEQ ID NO: 43336 - DNA, 15 bp, Homo sapiens
accctcctaagctac

SEQ ID NO: 43337 - DNA, 15 bp, Homo sapiens
ccctcctaagctacc

SEQ ID NO: 43338 - DNA, 15 bp, Homo sapiens
cctcctaagctaccc

SEQ ID NO: 43339 - DNA, 15 bp, Homo sapiens
ctcctaagctaccca

SEQ ID NO: 43340 - DNA, 15 bp, Homo sapiens
tcctaagctacccag

SEQ ID NO: 43341 - DNA, 15 bp, Homo sapiens
cctaagctacccagg

SEQ ID NO: 43342 - DNA, 15 bp, Homo sapiens
ctaagctacccaggt

SEQ ID NO: 43343 - DNA, 15 bp, Homo sapiens
taagctacccaggtc

SEQ ID NO: 43344 - DNA, 15 bp, Homo sapiens
aagctacccaggtcc

SEQ ID NO: 43345 - DNA, 15 bp, Homo sapiens
agctacccaggtccc

SEQ ID NO: 43346 - DNA, 15 bp, Homo sapiens
gctacccaggtccct

SEQ ID NO: 43347 - DNA, 15 bp, Homo sapiens
ctacccaggtccctc

SEQ ID NO: 43348 - DNA, 15 bp, Homo sapiens
tacccaggtccctca

SEQ ID NO: 43349 - DNA, 15 bp, Homo sapiens
acccaggtccctcac

SEQ ID NO: 43350 - DNA, 15 bp, Homo sapiens
cccaggtccctcaca

SEQ ID NO: 43351 - DNA, 15 bp, Homo sapiens
ccaggtccctcacac

SEQ ID NO: 43352 - DNA, 15 bp, Homo sapiens
caggtccctcacaca

SEQ ID NO: 43353 - DNA, 15 bp, Homo sapiens
aggtccctcacacag

SEQ ID NO: 43354 - DNA, 15 bp, Homo sapiens
ggtccctcacacagg

SEQ ID NO: 43355 - DNA, 15 bp, Homo sapiens
gtccctcacacaggc

SEQ ID NO: 43356 - DNA, 15 bp, Homo sapiens
tccctcacacaggcc

SEQ ID NO: 43357 - DNA, 15 bp, Homo sapiens
ccctcacacaggcct

SEQ ID NO: 43358 - DNA, 15 bp, Homo sapiens
cctcacacaggcctt

SEQ ID NO: 43359 - DNA, 15 bp, Homo sapiens
ctcacacaggcctta

SEQ ID NO: 43360 - DNA, 15 bp, Homo sapiens
tcacacaggccttac

SEQ ID NO: 43361 - DNA, 15 bp, Homo sapiens
cacacaggccttacc

SEQ ID NO: 43362 - DNA, 15 bp, Homo sapiens
acacaggccttacca

SEQ ID NO: 43363 - DNA, 15 bp, Homo sapiens
cacaggccttaccag

SEQ ID NO: 43364 - DNA, 15 bp, Homo sapiens
acaggccttaccagc

SEQ ID NO: 43365 - DNA, 15 bp, Homo sapiens
caggccttaccagct

SEQ ID NO: 43366 - DNA, 15 bp, Homo sapiens
aggccttaccagctg

SEQ ID NO: 43367 - DNA, 15 bp, Homo sapiens
ggccttaccagctgc

SEQ ID NO: 43368 - DNA, 15 bp, Homo sapiens
gccttaccagctgct

SEQ ID NO: 43369 - DNA, 15 bp, Homo sapiens
ccttaccagctgctt

SEQ ID NO: 43370 - DNA, 15 bp, Homo sapiens
cttaccagctgctta

SEQ ID NO: 43371 - DNA, 15 bp, Homo sapiens
ttaccagctgcttat

SEQ ID NO: 43372 - DNA, 15 bp, Homo sapiens
taccagctgcttata

SEQ ID NO: 43373 - DNA, 15 bp, Homo sapiens
accagctgcttatag

SEQ ID NO: 43374 - DNA, 15 bp, Homo sapiens
ccagctgcttataga

SEQ ID NO: 43375 - DNA, 15 bp, Homo sapiens
cagctgcttatagac

SEQ ID NO: 43376 - DNA, 15 bp, Homo sapiens
agctgcttatagacc

SEQ ID NO: 43377 - DNA, 15 bp, Homo sapiens
gctgcttatagacct

SEQ ID NO: 43378 - DNA, 15 bp, Homo sapiens
ctgcttatagacctc

SEQ ID NO: 43379 - DNA, 15 bp, Homo sapiens
tgcttatagacctcc

SEQ ID NO: 43380 - DNA, 15 bp, Homo sapiens
gcttatagacctcct

SEQ ID NO: 43381 - DNA, 15 bp, Homo sapiens
cttatagacctcctc

SEQ ID NO: 43382 - DNA, 15 bp, Homo sapiens
ttatagacctcctcc

SEQ ID NO: 43383 - DNA, 15 bp, Homo sapiens
tatagacctcctcct

SEQ ID NO: 43384 - DNA, 15 bp, Homo sapiens
atagacctcctcctt

SEQ ID NO: 43385 - DNA, 15 bp, Homo sapiens
tagacctcctccttc

SEQ ID NO: 43386 - DNA, 15 bp, Homo sapiens
agacctcctccttcc

SEQ ID NO: 43387 - DNA, 15 bp, Homo sapiens
gacctcctccttcct

SEQ ID NO: 43388 - DNA, 15 bp, Homo sapiens
acctcctccttcctg

SEQ ID NO: 43389 - DNA, 15 bp, Homo sapiens
cctcctccttcctgc

SEQ ID NO: 43390 - DNA, 15 bp, Homo sapiens
ctcctccttcctgcg

SEQ ID NO: 43391 - DNA, 15 bp, Homo sapiens
tcctccttcctgcgg

SEQ ID NO: 43392 - DNA, 15 bp, Homo sapiens
cctccttcctgcggg

SEQ ID NO: 43393 - DNA, 15 bp, Homo sapiens
ctccttcctgcgggc

SEQ ID NO: 43394 - DNA, 15 bp, Homo sapiens
tccttcctgcgggcc

SEQ ID NO: 43395 - DNA, 15 bp, Homo sapiens
ccttcctgcgggcct

SEQ ID NO: 43396 - DNA, 15 bp, Homo sapiens
cttcctgcgggcctc

SEQ ID NO: 43397 - DNA, 15 bp, Homo sapiens
ttcctgcgggcctct

SEQ ID NO: 43398 - DNA, 15 bp, Homo sapiens
tcctgcgggcctctt

SEQ ID NO: 43399 - DNA, 15 bp, Homo sapiens
cctgcgggcctcttc

SEQ ID NO: 43400 - DNA, 15 bp, Homo sapiens
ctgcgggcctcttca

SEQ ID NO: 43401 - DNA, 15 bp, Homo sapiens
tgcgggcctcttcag

SEQ ID NO: 43402 - DNA, 15 bp, Homo sapiens
gcgggcctcttcagc

SEQ ID NO: 43403 - DNA, 15 bp, Homo sapiens
cgggcctcttcagca

SEQ ID NO: 43404 - DNA, 15 bp, Homo sapiens
gggcctcttcagcag

SEQ ID NO: 43405 - DNA, 15 bp, Homo sapiens
ggcctcttcagcagc

SEQ ID NO: 43406 - DNA, 15 bp, Homo sapiens
gcctcttcagcagcc

SEQ ID NO: 43407 - DNA, 15 bp, Homo sapiens
cctcttcagcagccg

SEQ ID NO: 43408 - DNA, 15 bp, Homo sapiens
ctcttcagcagccgc

SEQ ID NO: 43409 - DNA, 15 bp, Homo sapiens
tcttcagcagccgcc

SEQ ID NO: 43410 - DNA, 15 bp, Homo sapiens
cttcagcagccgccc

SEQ ID NO: 43411 - DNA, 15 bp, Homo sapiens
ttcagcagccgcccg

SEQ ID NO: 43412 - DNA, 15 bp, Homo sapiens
tcagcagccgcccgg

SEQ ID NO: 43413 - DNA, 15 bp, Homo sapiens
cagcagccgcccgga

SEQ ID NO: 43414 - DNA, 15 bp, Homo sapiens
agcagccgcccggac

SEQ ID NO: 43415 - DNA, 15 bp, Homo sapiens
gcagccgcccggaca

SEQ ID NO: 43416 - DNA, 15 bp, Homo sapiens
cagccgcccggacac

SEQ ID NO: 43417 - DNA, 15 bp, Homo sapiens
agccgcccggacact

SEQ ID NO: 43418 - DNA, 15 bp, Homo sapiens
gccgcccggacactc

SEQ ID NO: 43419 - DNA, 15 bp, Homo sapiens
ccgcccggacactct

SEQ ID NO: 43420 - DNA, 15 bp, Homo sapiens
cgcccggacactctg

SEQ ID NO: 43421 - DNA, 15 bp, Homo sapiens
gcccggacactctgg

SEQ ID NO: 43422 - DNA, 15 bp, Homo sapiens
cccggacactctggt

SEQ ID NO: 43423 - DNA, 15 bp, Homo sapiens
ccggacactctggtg

SEQ ID NO: 43424 - DNA, 15 bp, Homo sapiens
cggacactctggtgc

SEQ ID NO: 43425 - DNA, 15 bp, Homo sapiens
ggacactctggtgca

SEQ ID NO: 43426 - DNA, 15 bp, Homo sapiens
gacactctggtgcag

SEQ ID NO: 43427 - DNA, 15 bp, Homo sapiens
acactctggtgcagt

SEQ ID NO: 43428 - DNA, 15 bp, Homo sapiens
cactctggtgcagtt

SEQ ID NO: 43429 - DNA, 15 bp, Homo sapiens
actctggtgcagttc

SEQ ID NO: 43430 - DNA, 15 bp, Homo sapiens
ctctggtgcagttct

SEQ ID NO: 43431 - DNA, 15 bp, Homo sapiens
tctggtgcagttctt

SEQ ID NO: 43432 - DNA, 15 bp, Homo sapiens
ctggtgcagttcttg

SEQ ID NO: 43433 - DNA, 15 bp, Homo sapiens
tggtgcagttcttgg

SEQ ID NO: 43434 - DNA, 15 bp, Homo sapiens
ggtgcagttcttgga

SEQ ID NO: 43435 - DNA, 15 bp, Homo sapiens
gtgcagttcttggat

SEQ ID NO: 43436 - DNA, 15 bp, Homo sapiens
tgcagttcttggatc

SEQ ID NO: 43437 - DNA, 15 bp, Homo sapiens
gcagttcttggatct

SEQ ID NO: 43438 - DNA, 15 bp, Homo sapiens
cagttcttggatctc

SEQ ID NO: 43439 - DNA, 15 bp, Homo sapiens
agttcttggatctct

SEQ ID NO: 43440 - DNA, 15 bp, Homo sapiens
gttcttggatctctg

SEQ ID NO: 43441 - DNA, 15 bp, Homo sapiens
ttcttggatctctgc

SEQ ID NO: 43442 - DNA, 15 bp, Homo sapiens
tcttggatctctgcc

SEQ ID NO: 43443 - DNA, 15 bp, Homo sapiens
cttggatctctgcca

SEQ ID NO: 43444 - DNA, 15 bp, Homo sapiens
ttggatctctgccag

SEQ ID NO: 43445 - DNA, 15 bp, Homo sapiens
tggatctctgccagc

SEQ ID NO: 43446 - DNA, 15 bp, Homo sapiens
ggatctctgccagcc

SEQ ID NO: 43447 - DNA, 15 bp, Homo sapiens
gatctctgccagccg

SEQ ID NO: 43448 - DNA, 15 bp, Homo sapiens
atctctgccagccgt

SEQ ID NO: 43449 - DNA, 15 bp, Homo sapiens
tctctgccagccgtc

SEQ ID NO: 43450 - DNA, 15 bp, Homo sapiens
ctctgccagccgtcg

SEQ ID NO: 43451 - DNA, 15 bp, Homo sapiens
tctgccagccgtcga

SEQ ID NO: 43452 - DNA, 15 bp, Homo sapiens
ctgccagccgtcgag

SEQ ID NO: 43453 - DNA, 15 bp, Homo sapiens
tgccagccgtcgaga

SEQ ID NO: 43454 - DNA, 15 bp, Homo sapiens
gccagccgtcgagaa

SEQ ID NO: 43455 - DNA, 15 bp, Homo sapiens
ccagccgtcgagaag

SEQ ID NO: 43456 - DNA, 15 bp, Homo sapiens
cagccgtcgagaaga

SEQ ID NO: 43457 - DNA, 15 bp, Homo sapiens
agccgtcgagaagat

SEQ ID NO: 43458 - DNA, 15 bp, Homo sapiens
gccgtcgagaagatt

SEQ ID NO: 43459 - DNA, 15 bp, Homo sapiens
ccgtcgagaagattc

SEQ ID NO: 43460 - DNA, 15 bp, Homo sapiens
cgtcgagaagattcc

SEQ ID NO: 43461 - DNA, 15 bp, Homo sapiens
gtcgagaagattcca

SEQ ID NO: 43462 - DNA, 15 bp, Homo sapiens
tcgagaagattccag

SEQ ID NO: 43463 - DNA, 15 bp, Homo sapiens
cgagaagattccagc

SEQ ID NO: 43464 - DNA, 15 bp, Homo sapiens
gagaagattccagct

SEQ ID NO: 43465 - DNA, 15 bp, Homo sapiens
agaagattccagctg

SEQ ID NO: 43466 - DNA, 15 bp, Homo sapiens
gaagattccagctgc

SEQ ID NO: 43467 - DNA, 15 bp, Homo sapiens
aagattccagctgcc

SEQ ID NO: 43468 - DNA, 15 bp, Homo sapiens
agattccagctgcca

SEQ ID NO: 43469 - DNA, 15 bp, Homo sapiens
gattccagctgccat

SEQ ID NO: 43470 - DNA, 15 bp, Homo sapiens
attccagctgccatg

SEQ ID NO: 43471 - DNA, 15 bp, Homo sapiens
ttccagctgccatga

SEQ ID NO: 43472 - DNA, 15 bp, Homo sapiens
tccagctgccatgag

SEQ ID NO: 43473 - DNA, 15 bp, Homo sapiens
ccagctgccatgagc

SEQ ID NO: 43474 - DNA, 15 bp, Homo sapiens
cagctgccatgagcc

SEQ ID NO: 43475 - DNA, 15 bp, Homo sapiens
agctgccatgagccc

SEQ ID NO: 43476 - DNA, 15 bp, Homo sapiens
gctgccatgagccca

SEQ ID NO: 43477 - DNA, 15 bp, Homo sapiens
ctgccatgagcccac

SEQ ID NO: 43478 - DNA, 15 bp, Homo sapiens
tgccatgagcccaca

SEQ ID NO: 43479 - DNA, 15 bp, Homo sapiens
gccatgagcccacag

SEQ ID NO: 43480 - DNA, 15 bp, Homo sapiens
ccatgagcccacagg

SEQ ID NO: 43481 - DNA, 15 bp, Homo sapiens
catgagcccacaggc

SEQ ID NO: 43482 - DNA, 15 bp, Homo sapiens
atgagcccacaggca

SEQ ID NO: 43483 - DNA, 15 bp, Homo sapiens
tgagcccacaggcag

SEQ ID NO: 43484 - DNA, 15 bp, Homo sapiens
gagcccacaggcaga

SEQ ID NO: 43485 - DNA, 15 bp, Homo sapiens
agcccacaggcagaa

SEQ ID NO: 43486 - DNA, 15 bp, Homo sapiens
gcccacaggcagaag

SEQ ID NO: 43487 - DNA, 15 bp, Homo sapiens
cccacaggcagaaga

SEQ ID NO: 43488 - DNA, 15 bp, Homo sapiens
ccacaggcagaagac

SEQ ID NO: 43489 - DNA, 15 bp, Homo sapiens
cacaggcagaagaca

SEQ ID NO: 43490 - DNA, 15 bp, Homo sapiens
acaggcagaagacag

SEQ ID NO: 43491 - DNA, 15 bp, Homo sapiens
caggcagaagacagt

SEQ ID NO: 43492 - DNA, 15 bp, Homo sapiens
aggcagaagacagtg

SEQ ID NO: 43493 - DNA, 15 bp, Homo sapiens
ggcagaagacagtga

SEQ ID NO: 43494 - DNA, 15 bp, Homo sapiens
gcagaagacagtgag

SEQ ID NO: 43495 - DNA, 15 bp, Homo sapiens
cagaagacagtgagc

SEQ ID NO: 43496 - DNA, 15 bp, Homo sapiens
agaagacagtgagca

SEQ ID NO: 43497 - DNA, 15 bp, Homo sapiens
gaagacagtgagcag

SEQ ID NO: 43498 - DNA, 15 bp, Homo sapiens
aagacagtgagcaga

SEQ ID NO: 43499 - DNA, 15 bp, Homo sapiens
agacagtgagcagag

SEQ ID NO: 43500 - DNA, 15 bp, Homo sapiens
gacagtgagcagagc

SEQ ID NO: 43501 - DNA, 15 bp, Homo sapiens
acagtgagcagagca

SEQ ID NO: 43502 - DNA, 15 bp, Homo sapiens
cagtgagcagagcat

SEQ ID NO: 43503 - DNA, 15 bp, Homo sapiens
agtgagcagagcata

SEQ ID NO: 43504 - DNA, 15 bp, Homo sapiens
gtgagcagagcatag

SEQ ID NO: 43505 - DNA, 15 bp, Homo sapiens
tgagcagagcatagg

SEQ ID NO: 43506 - DNA, 15 bp, Homo sapiens
gagcagagcataggg

SEQ ID NO: 43507 - DNA, 15 bp, Homo sapiens
agcagagcataggga

SEQ ID NO: 43508 - DNA, 15 bp, Homo sapiens
gcagagcatagggat

SEQ ID NO: 43509 - DNA, 15 bp, Homo sapiens
cagagcatagggatg

SEQ ID NO: 43510 - DNA, 15 bp, Homo sapiens
agagcatagggatgg

SEQ ID NO: 43511 - DNA, 15 bp, Homo sapiens
gagcatagggatggc

SEQ ID NO: 43512 - DNA, 15 bp, Homo sapiens
agcatagggatggcc

SEQ ID NO: 43513 - DNA, 15 bp, Homo sapiens
gcatagggatggccc

SEQ ID NO: 43514 - DNA, 15 bp, Homo sapiens
catagggatggcccc

SEQ ID NO: 43515 - DNA, 15 bp, Homo sapiens
atagggatggccccc

SEQ ID NO: 43516 - DNA, 15 bp, Homo sapiens
tagggatggccccct

SEQ ID NO: 43517 - DNA, 15 bp, Homo sapiens
agggatggcccccta

SEQ ID NO: 43518 - DNA, 15 bp, Homo sapiens
gggatggccccctag

SEQ ID NO: 43519 - DNA, 15 bp, Homo sapiens
ggatggccccctaga

SEQ ID NO: 43520 - DNA, 15 bp, Homo sapiens
gatggccccctagag

SEQ ID NO: 43521 - DNA, 15 bp, Homo sapiens
atggccccctagaga

SEQ ID NO: 43522 - DNA, 15 bp, Homo sapiens
tggccccctagagag

SEQ ID NO: 43523 - DNA, 15 bp, Homo sapiens
ggccccctagagagg

SEQ ID NO: 43524 - DNA, 15 bp, Homo sapiens
gccccctagagaggg

SEQ ID NO: 43525 - DNA, 15 bp, Homo sapiens
ccccctagagaggga

SEQ ID NO: 43526 - DNA, 15 bp, Homo sapiens
cccctagagagggac

SEQ ID NO: 43527 - DNA, 15 bp, Homo sapiens
ccctagagagggacc

SEQ ID NO: 43528 - DNA, 15 bp, Homo sapiens
cctagagagggaccg

SEQ ID NO: 43529 - DNA, 15 bp, Homo sapiens
ctagagagggaccga

SEQ ID NO: 43530 - DNA, 15 bp, Homo sapiens
tagagagggaccgag

SEQ ID NO: 43531 - DNA, 15 bp, Homo sapiens
agagagggaccgagc

SEQ ID NO: 43532 - DNA, 15 bp, Homo sapiens
gagagggaccgagcc

SEQ ID NO: 43533 - DNA, 15 bp, Homo sapiens
agagggaccgagcct

SEQ ID NO: 43534 - DNA, 15 bp, Homo sapiens
gagggaccgagcctg

SEQ ID NO: 43535 - DNA, 15 bp, Homo sapiens
agggaccgagcctgc

SEQ ID NO: 43536 - DNA, 15 bp, Homo sapiens
gggaccgagcctgcc

SEQ ID NO: 43537 - DNA, 15 bp, Homo sapiens
ggaccgagcctgccc

SEQ ID NO: 43538 - DNA, 15 bp, Homo sapiens
gaccgagcctgccct

SEQ ID NO: 43539 - DNA, 15 bp, Homo sapiens
accgagcctgccctg

SEQ ID NO: 43540 - DNA, 15 bp, Homo sapiens
ccgagcctgccctgg

SEQ ID NO: 43541 - DNA, 15 bp, Homo sapiens
cgagcctgccctggc

SEQ ID NO: 43542 - DNA, 15 bp, Homo sapiens
gagcctgccctggcc

SEQ ID NO: 43543 - DNA, 15 bp, Homo sapiens
agcctgccctggccc

SEQ ID NO: 43544 - DNA, 15 bp, Homo sapiens
gcctgccctggcccg

SEQ ID NO: 43545 - DNA, 15 bp, Homo sapiens
cctgccctggcccgc

SEQ ID NO: 43546 - DNA, 15 bp, Homo sapiens
ctgccctggcccgcc

SEQ ID NO: 43547 - DNA, 15 bp, Homo sapiens
tgccctggcccgccc

SEQ ID NO: 43548 - DNA, 15 bp, Homo sapiens
gccctggcccgccca

SEQ ID NO: 43549 - DNA, 15 bp, Homo sapiens
ccctggcccgcccac

SEQ ID NO: 43550 - DNA, 15 bp, Homo sapiens
cctggcccgcccaca

SEQ ID NO: 43551 - DNA, 15 bp, Homo sapiens
ctggcccgcccacag

SEQ ID NO: 43552 - DNA, 15 bp, Homo sapiens
tggcccgcccacagc

SEQ ID NO: 43553 - DNA, 15 bp, Homo sapiens
ggcccgcccacagcc

SEQ ID NO: 43554 - DNA, 15 bp, Homo sapiens
gcccgcccacagccc

SEQ ID NO: 43555 - DNA, 15 bp, Homo sapiens
cccgcccacagccca

SEQ ID NO: 43556 - DNA, 15 bp, Homo sapiens
ccgcccacagcccag

SEQ ID NO: 43557 - DNA, 15 bp, Homo sapiens
cgcccacagcccagg

SEQ ID NO: 43558 - DNA, 15 bp, Homo sapiens
gcccacagcccaggg

SEQ ID NO: 43559 - DNA, 15 bp, Homo sapiens
cccacagcccagggc

SEQ ID NO: 43560 - DNA, 15 bp, Homo sapiens
ccacagcccagggcc

SEQ ID NO: 43561 - DNA, 15 bp, Homo sapiens
cacagcccagggccc

SEQ ID NO: 43562 - DNA, 15 bp, Homo sapiens
acagcccagggcccc

SEQ ID NO: 43563 - DNA, 15 bp, Homo sapiens
cagcccagggcccca

SEQ ID NO: 43564 - DNA, 15 bp, Homo sapiens
agcccagggccccac

SEQ ID NO: 43565 - DNA, 15 bp, Homo sapiens
gcccagggccccact

SEQ ID NO: 43566 - DNA, 15 bp, Homo sapiens
cccagggccccactg

SEQ ID NO: 43567 - DNA, 15 bp, Homo sapiens
ccagggccccactgc

SEQ ID NO: 43568 - DNA, 15 bp, Homo sapiens
cagggccccactgct

SEQ ID NO: 43569 - DNA, 15 bp, Homo sapiens
agggccccactgctt

SEQ ID NO: 43570 - DNA, 15 bp, Homo sapiens
gggccccactgctta

SEQ ID NO: 43571 - DNA, 15 bp, Homo sapiens
ggccccactgcttac

SEQ ID NO: 43572 - DNA, 15 bp, Homo sapiens
gccccactgcttacc

SEQ ID NO: 43573 - DNA, 15 bp, Homo sapiens
ccccactgcttacct

SEQ ID NO: 43574 - DNA, 15 bp, Homo sapiens
cccactgcttacctc

SEQ ID NO: 43575 - DNA, 15 bp, Homo sapiens
ccactgcttacctct

SEQ ID NO: 43576 - DNA, 15 bp, Homo sapiens
cactgcttacctctc

SEQ ID NO: 43577 - DNA, 15 bp, Homo sapiens
actgcttacctctct

SEQ ID NO: 43578 - DNA, 15 bp, Homo sapiens
ctgcttacctctctg

SEQ ID NO: 43579 - DNA, 15 bp, Homo sapiens
tgcttacctctctgc

SEQ ID NO: 43580 - DNA, 15 bp, Homo sapiens
gcttacctctctgca

SEQ ID NO: 43581 - DNA, 15 bp, Homo sapiens
cttacctctctgcaa

SEQ ID NO: 43582 - DNA, 15 bp, Homo sapiens
ttacctctctgcaat

SEQ ID NO: 43583 - DNA, 15 bp, Homo sapiens
tacctctctgcaatc

SEQ ID NO: 43584 - DNA, 15 bp, Homo sapiens
acctctctgcaatcc

SEQ ID NO: 43585 - DNA, 15 bp, Homo sapiens
cctctctgcaatcct

SEQ ID NO: 43586 - DNA, 15 bp, Homo sapiens
ctctctgcaatcctg

SEQ ID NO: 43587 - DNA, 15 bp, Homo sapiens
tctctgcaatcctgc

SEQ ID NO: 43588 - DNA, 15 bp, Homo sapiens
ctctgcaatcctgca

SEQ ID NO: 43589 - DNA, 15 bp, Homo sapiens
tctgcaatcctgcag

SEQ ID NO: 43590 - DNA, 15 bp, Homo sapiens
ctgcaatcctgcagc

SEQ ID NO: 43591 - DNA, 15 bp, Homo sapiens
tgcaatcctgcagct

SEQ ID NO: 43592 - DNA, 15 bp, Homo sapiens
gcaatcctgcagctt

SEQ ID NO: 43593 - DNA, 15 bp, Homo sapiens
caatcctgcagcttt

SEQ ID NO: 43594 - DNA, 15 bp, Homo sapiens
aatcctgcagctttc

SEQ ID NO: 43595 - DNA, 15 bp, Homo sapiens
atcctgcagctttcg

SEQ ID NO: 43596 - DNA, 15 bp, Homo sapiens
tcctgcagctttcgg

SEQ ID NO: 43597 - DNA, 15 bp, Homo sapiens
cctgcagctttcgga

SEQ ID NO: 43598 - DNA, 15 bp, Homo sapiens
ctgcagctttcggag

SEQ ID NO: 43599 - DNA, 15 bp, Homo sapiens
tgcagctttcggagg

SEQ ID NO: 43600 - DNA, 15 bp, Homo sapiens
gcagctttcggaggt

SEQ ID NO: 43601 - DNA, 15 bp, Homo sapiens
cagctttcggaggtg

SEQ ID NO: 43602 - DNA, 15 bp, Homo sapiens
agctttcggaggtgg

SEQ ID NO: 43603 - DNA, 15 bp, Homo sapiens
gctttcggaggtggc

SEQ ID NO: 43604 - DNA, 15 bp, Homo sapiens
ctttcggaggtggcg

SEQ ID NO: 43605 - DNA, 15 bp, Homo sapiens
tttcggaggtggcgg

SEQ ID NO: 43606 - DNA, 15 bp, Homo sapiens
ttcggaggtggcggt

SEQ ID NO: 43607 - DNA, 15 bp, Homo sapiens
tcggaggtggcggta

SEQ ID NO: 43608 - DNA, 15 bp, Homo sapiens
cggaggtggcggtac

SEQ ID NO: 43609 - DNA, 15 bp, Homo sapiens
ggaggtggcggtact

SEQ ID NO: 43610 - DNA, 15 bp, Homo sapiens
gaggtggcggtactc

SEQ ID NO: 43611 - DNA, 15 bp, Homo sapiens
aggtggcggtactca

SEQ ID NO: 43612 - DNA, 15 bp, Homo sapiens
ggtggcggtactcag

SEQ ID NO: 43613 - DNA, 15 bp, Homo sapiens
gtggcggtactcagc

SEQ ID NO: 43614 - DNA, 15 bp, Homo sapiens
tggcggtactcagcg

SEQ ID NO: 43615 - DNA, 15 bp, Homo sapiens
ggcggtactcagcga

SEQ ID NO: 43616 - DNA, 15 bp, Homo sapiens
gcggtactcagcgag

SEQ ID NO: 43617 - DNA, 15 bp, Homo sapiens
cggtactcagcgagg

SEQ ID NO: 43618 - DNA, 15 bp, Homo sapiens
ggtactcagcgagga

SEQ ID NO: 43619 - DNA, 15 bp, Homo sapiens
gtactcagcgaggag

SEQ ID NO: 43620 - DNA, 15 bp, Homo sapiens
tactcagcgaggagt

SEQ ID NO: 43621 - DNA, 15 bp, Homo sapiens
actcagcgaggagtg

SEQ ID NO: 43622 - DNA, 15 bp, Homo sapiens
ctcagcgaggagtgg

SEQ ID NO: 43623 - DNA, 15 bp, Homo sapiens
tcagcgaggagtggg

SEQ ID NO: 43624 - DNA, 15 bp, Homo sapiens
cagcgaggagtggga

SEQ ID NO: 43625 - DNA, 15 bp, Homo sapiens
agcgaggagtgggac

SEQ ID NO: 43626 - DNA, 15 bp, Homo sapiens
gcgaggagtgggacc

SEQ ID NO: 43627 - DNA, 15 bp, Homo sapiens
cgaggagtgggaccc

SEQ ID NO: 43628 - DNA, 15 bp, Homo sapiens
gaggagtgggacccg

SEQ ID NO: 43629 - DNA, 15 bp, Homo sapiens
aggagtgggacccgg

SEQ ID NO: 43630 - DNA, 15 bp, Homo sapiens
ggagtgggacccggt

SEQ ID NO: 43631 - DNA, 15 bp, Homo sapiens
gagtgggacccggtg

SEQ ID NO: 43632 - DNA, 15 bp, Homo sapiens
agtgggacccggtgc

SEQ ID NO: 43633 - DNA, 15 bp, Homo sapiens
gtgggacccggtgct

SEQ ID NO: 43634 - DNA, 15 bp, Homo sapiens
tgggacccggtgctt

SEQ ID NO: 43635 - DNA, 15 bp, Homo sapiens
gggacccggtgcttc

SEQ ID NO: 43636 - DNA, 15 bp, Homo sapiens
ggacccggtgcttct

SEQ ID NO: 43637 - DNA, 15 bp, Homo sapiens
gacccggtgcttctc

SEQ ID NO: 43638 - DNA, 15 bp, Homo sapiens
acccggtgcttctcc

SEQ ID NO: 43639 - DNA, 15 bp, Homo sapiens
cccggtgcttctccc

SEQ ID NO: 43640 - DNA, 15 bp, Homo sapiens
ccggtgcttctccca

SEQ ID NO: 43641 - DNA, 15 bp, Homo sapiens
cggtgcttctcccac

SEQ ID NO: 43642 - DNA, 15 bp, Homo sapiens
ggtgcttctcccact

SEQ ID NO: 43643 - DNA, 15 bp, Homo sapiens
gtgcttctcccactg

SEQ ID NO: 43644 - DNA, 15 bp, Homo sapiens
tgcttctcccactga

SEQ ID NO: 43645 - DNA, 15 bp, Homo sapiens
gcttctcccactgac

SEQ ID NO: 43646 - DNA, 15 bp, Homo sapiens
cttctcccactgacc

SEQ ID NO: 43647 - DNA, 15 bp, Homo sapiens
ttctcccactgaccc

SEQ ID NO: 43648 - DNA, 15 bp, Homo sapiens
tctcccactgacccg

SEQ ID NO: 43649 - DNA, 15 bp, Homo sapiens
ctcccactgacccgc

SEQ ID NO: 43650 - DNA, 15 bp, Homo sapiens
tcccactgacccgcc

SEQ ID NO: 43651 - DNA, 15 bp, Homo sapiens
cccactgacccgcca

SEQ ID NO: 43652 - DNA, 15 bp, Homo sapiens
ccactgacccgccaa

SEQ ID NO: 43653 - DNA, 15 bp, Homo sapiens
cactgacccgccaag

SEQ ID NO: 43654 - DNA, 15 bp, Homo sapiens
actgacccgccaagt

SEQ ID NO: 43655 - DNA, 15 bp, Homo sapiens
ctgacccgccaagtg

SEQ ID NO: 43656 - DNA, 15 bp, Homo sapiens
tgacccgccaagtgg

SEQ ID NO: 43657 - DNA, 15 bp, Homo sapiens
gacccgccaagtgga

SEQ ID NO: 43658 - DNA, 15 bp, Homo sapiens
acccgccaagtggat

SEQ ID NO: 43659 - DNA, 15 bp, Homo sapiens
cccgccaagtggatg

SEQ ID NO: 43660 - DNA, 15 bp, Homo sapiens
ccgccaagtggatga

SEQ ID NO: 43661 - DNA, 15 bp, Homo sapiens
cgccaagtggatgac

SEQ ID NO: 43662 - DNA, 15 bp, Homo sapiens
gccaagtggatgacc

SEQ ID NO: 43663 - DNA, 15 bp, Homo sapiens
ccaagtggatgaccc

SEQ ID NO: 43664 - DNA, 15 bp, Homo sapiens
caagtggatgacccg

SEQ ID NO: 43665 - DNA, 15 bp, Homo sapiens
aagtggatgacccgc

SEQ ID NO: 43666 - DNA, 15 bp, Homo sapiens
agtggatgacccgct

SEQ ID NO: 43667 - DNA, 15 bp, Homo sapiens
gtggatgacccgctg

SEQ ID NO: 43668 - DNA, 15 bp, Homo sapiens
tggatgacccgctgg

SEQ ID NO: 43669 - DNA, 15 bp, Homo sapiens
ggatgacccgctggg

SEQ ID NO: 43670 - DNA, 15 bp, Homo sapiens
gatgacccgctgggc

SEQ ID NO: 43671 - DNA, 15 bp, Homo sapiens
atgacccgctgggca

SEQ ID NO: 43672 - DNA, 15 bp, Homo sapiens
tgacccgctgggcac

SEQ ID NO: 43673 - DNA, 15 bp, Homo sapiens
gacccgctgggcact

SEQ ID NO: 43674 - DNA, 15 bp, Homo sapiens
acccgctgggcacta

SEQ ID NO: 43675 - DNA, 15 bp, Homo sapiens
cccgctgggcactat

SEQ ID NO: 43676 - DNA, 15 bp, Homo sapiens
ccgctgggcactatt

SEQ ID NO: 43677 - DNA, 15 bp, Homo sapiens
cgctgggcactattc

SEQ ID NO: 43678 - DNA, 15 bp, Homo sapiens
gctgggcactattct

SEQ ID NO: 43679 - DNA, 15 bp, Homo sapiens
ctgggcactattctc

SEQ ID NO: 43680 - DNA, 15 bp, Homo sapiens
tgggcactattctcc

SEQ ID NO: 43681 - DNA, 15 bp, Homo sapiens
gggcactattctcca

SEQ ID NO: 43682 - DNA, 15 bp, Homo sapiens
ggcactattctccac

SEQ ID NO: 43683 - DNA, 15 bp, Homo sapiens
gcactattctccacc

SEQ ID NO: 43684 - DNA, 15 bp, Homo sapiens
cactattctccacca

SEQ ID NO: 43685 - DNA, 15 bp, Homo sapiens
actattctccaccac

SEQ ID NO: 43686 - DNA, 15 bp, Homo sapiens
ctattctccaccaca

SEQ ID NO: 43687 - DNA, 15 bp, Homo sapiens
tattctccaccacaa

SEQ ID NO: 43688 - DNA, 15 bp, Homo sapiens
attctccaccacaag

SEQ ID NO: 43689 - DNA, 15 bp, Homo sapiens
ttctccaccacaagc

SEQ ID NO: 43690 - DNA, 15 bp, Homo sapiens
tctccaccacaagct

SEQ ID NO: 43691 - DNA, 15 bp, Homo sapiens
ctccaccacaagctg

SEQ ID NO: 43692 - DNA, 15 bp, Homo sapiens
tccaccacaagctgg

SEQ ID NO: 43693 - DNA, 15 bp, Homo sapiens
ccaccacaagctggt

SEQ ID NO: 43694 - DNA, 15 bp, Homo sapiens
caccacaagctggtg

SEQ ID NO: 43695 - DNA, 15 bp, Homo sapiens
accacaagctggtgg

SEQ ID NO: 43696 - DNA, 15 bp, Homo sapiens
ccacaagctggtggg

SEQ ID NO: 43697 - DNA, 15 bp, Homo sapiens
cacaagctggtgggg

SEQ ID NO: 43698 - DNA, 15 bp, Homo sapiens
acaagctggtggggg

SEQ ID NO: 43699 - DNA, 15 bp, Homo sapiens
caagctggtggggga

SEQ ID NO: 43700 - DNA, 15 bp, Homo sapiens
aagctggtgggggat

SEQ ID NO: 43701 - DNA, 15 bp, Homo sapiens
agctggtgggggatg

SEQ ID NO: 43702 - DNA, 15 bp, Homo sapiens
gctggtgggggatgg

SEQ ID NO: 43703 - DNA, 15 bp, Homo sapiens
ctggtgggggatggg

SEQ ID NO: 43704 - DNA, 15 bp, Homo sapiens
tggtgggggatgggt

SEQ ID NO: 43705 - DNA, 15 bp, Homo sapiens
ggtgggggatgggta

SEQ ID NO: 43706 - DNA, 15 bp, Homo sapiens
gtgggggatgggtac

SEQ ID NO: 43707 - DNA, 15 bp, Homo sapiens
tgggggatgggtaca

SEQ ID NO: 43708 - DNA, 15 bp, Homo sapiens
gggggatgggtacat

SEQ ID NO: 43709 - DNA, 15 bp, Homo sapiens
ggggatgggtacatg

SEQ ID NO: 43710 - DNA, 15 bp, Homo sapiens
gggatgggtacatgt

SEQ ID NO: 43711 - DNA, 15 bp, Homo sapiens
ggatgggtacatgtc

SEQ ID NO: 43712 - DNA, 15 bp, Homo sapiens
gatgggtacatgtca

SEQ ID NO: 43713 - DNA, 15 bp, Homo sapiens
atgggtacatgtcac

SEQ ID NO: 43714 - DNA, 15 bp, Homo sapiens
tgggtacatgtcaca

SEQ ID NO: 43715 - DNA, 15 bp, Homo sapiens
gggtacatgtcacac

SEQ ID NO: 43716 - DNA, 15 bp, Homo sapiens
ggtacatgtcacaca

SEQ ID NO: 43717 - DNA, 15 bp, Homo sapiens
gtacatgtcacacag

SEQ ID NO: 43718 - DNA, 15 bp, Homo sapiens
tacatgtcacacagg

SEQ ID NO: 43719 - DNA, 15 bp, Homo sapiens
acatgtcacacaggc

SEQ ID NO: 43720 - DNA, 15 bp, Homo sapiens
catgtcacacaggct

SEQ ID NO: 43721 - DNA, 15 bp, Homo sapiens
atgtcacacaggctg

SEQ ID NO: 43722 - DNA, 15 bp, Homo sapiens
tgtcacacaggctgg

SEQ ID NO: 43723 - DNA, 15 bp, Homo sapiens
gtcacacaggctggg

SEQ ID NO: 43724 - DNA, 15 bp, Homo sapiens
tcacacaggctgggc

SEQ ID NO: 43725 - DNA, 15 bp, Homo sapiens
cacacaggctgggcc

SEQ ID NO: 43726 - DNA, 15 bp, Homo sapiens
acacaggctgggccc

SEQ ID NO: 43727 - DNA, 15 bp, Homo sapiens
cacaggctgggccct

SEQ ID NO: 43728 - DNA, 15 bp, Homo sapiens
acaggctgggccctc

SEQ ID NO: 43729 - DNA, 15 bp, Homo sapiens
caggctgggccctcc

SEQ ID NO: 43730 - DNA, 15 bp, Homo sapiens
aggctgggccctcca

SEQ ID NO: 43731 - DNA, 15 bp, Homo sapiens
ggctgggccctccaa

SEQ ID NO: 43732 - DNA, 15 bp, Homo sapiens
gctgggccctccaac

SEQ ID NO: 43733 - DNA, 15 bp, Homo sapiens
ctgggccctccaacc

SEQ ID NO: 43734 - DNA, 15 bp, Homo sapiens
tgggccctccaaccc

SEQ ID NO: 43735 - DNA, 15 bp, Homo sapiens
gggccctccaacccc

SEQ ID NO: 43736 - DNA, 15 bp, Homo sapiens
ggccctccaacccca

SEQ ID NO: 43737 - DNA, 15 bp, Homo sapiens
gccctccaaccccac

SEQ ID NO: 43738 - DNA, 15 bp, Homo sapiens
ccctccaaccccacc

SEQ ID NO: 43739 - DNA, 15 bp, Homo sapiens
cctccaaccccaccc

SEQ ID NO: 43740 - DNA, 15 bp, Homo sapiens
ctccaaccccacccc

SEQ ID NO: 43741 - DNA, 15 bp, Homo sapiens
tccaaccccacccca

SEQ ID NO: 43742 - DNA, 15 bp, Homo sapiens
ccaaccccaccccac

SEQ ID NO: 43743 - DNA, 15 bp, Homo sapiens
caaccccaccccacc

SEQ ID NO: 43744 - DNA, 15 bp, Homo sapiens
aaccccaccccaccc

SEQ ID NO: 43745 - DNA, 15 bp, Homo sapiens
accccaccccacccc

SEQ ID NO: 43746 - DNA, 15 bp, Homo sapiens
ccccaccccacccca

SEQ ID NO: 43747 - DNA, 15 bp, Homo sapiens
cccaccccaccccac

SEQ ID NO: 43748 - DNA, 15 bp, Homo sapiens
ccaccccaccccacc

SEQ ID NO: 43749 - DNA, 15 bp, Homo sapiens
caccccaccccaccc

SEQ ID NO: 43750 - DNA, 15 bp, Homo sapiens
accccaccccaccct

SEQ ID NO: 43751 - DNA, 15 bp, Homo sapiens
ccccaccccaccctg

SEQ ID NO: 43752 - DNA, 15 bp, Homo sapiens
cccaccccaccctgc

SEQ ID NO: 43753 - DNA, 15 bp, Homo sapiens
ccaccccaccctgcc

SEQ ID NO: 43754 - DNA, 15 bp, Homo sapiens
caccccaccctgccc

SEQ ID NO: 43755 - DNA, 15 bp, Homo sapiens
accccaccctgcccc

SEQ ID NO: 43756 - DNA, 15 bp, Homo sapiens
ccccaccctgcccct

SEQ ID NO: 43757 - DNA, 15 bp, Homo sapiens
cccaccctgcccctc

SEQ ID NO: 43758 - DNA, 15 bp, Homo sapiens
ccaccctgcccctct

SEQ ID NO: 43759 - DNA, 15 bp, Homo sapiens
caccctgcccctctc

SEQ ID NO: 43760 - DNA, 15 bp, Homo sapiens
accctgcccctctcc

SEQ ID NO: 43761 - DNA, 15 bp, Homo sapiens
ccctgcccctctccg

SEQ ID NO: 43762 - DNA, 15 bp, Homo sapiens
cctgcccctctccgc

SEQ ID NO: 43763 - DNA, 15 bp, Homo sapiens
ctgcccctctccgcc

SEQ ID NO: 43764 - DNA, 15 bp, Homo sapiens
tgcccctctccgccc

SEQ ID NO: 43765 - DNA, 15 bp, Homo sapiens
gcccctctccgccca

SEQ ID NO: 43766 - DNA, 15 bp, Homo sapiens
cccctctccgcccag

SEQ ID NO: 43767 - DNA, 15 bp, Homo sapiens
ccctctccgcccagc

SEQ ID NO: 43768 - DNA, 15 bp, Homo sapiens
cctctccgcccagct

SEQ ID NO: 43769 - DNA, 15 bp, Homo sapiens
ctctccgcccagcta

SEQ ID NO: 43770 - DNA, 15 bp, Homo sapiens
tctccgcccagctac

SEQ ID NO: 43771 - DNA, 15 bp, Homo sapiens
ctccgcccagctaca

SEQ ID NO: 43772 - DNA, 15 bp, Homo sapiens
tccgcccagctacag

SEQ ID NO: 43773 - DNA, 15 bp, Homo sapiens
ccgcccagctacagc

SEQ ID NO: 43774 - DNA, 15 bp, Homo sapiens
cgcccagctacagcc

SEQ ID NO: 43775 - DNA, 15 bp, Homo sapiens
gcccagctacagccc

SEQ ID NO: 43776 - DNA, 15 bp, Homo sapiens
cccagctacagcccc

SEQ ID NO: 43777 - DNA, 15 bp, Homo sapiens
ccagctacagcccca

SEQ ID NO: 43778 - DNA, 15 bp, Homo sapiens
cagctacagccccaa

SEQ ID NO: 43779 - DNA, 15 bp, Homo sapiens
agctacagccccaac

SEQ ID NO: 43780 - DNA, 15 bp, Homo sapiens
gctacagccccaacc

SEQ ID NO: 43781 - DNA, 15 bp, Homo sapiens
ctacagccccaaccc

SEQ ID NO: 43782 - DNA, 15 bp, Homo sapiens
tacagccccaacccc

SEQ ID NO: 43783 - DNA, 15 bp, Homo sapiens
acagccccaacccca

SEQ ID NO: 43784 - DNA, 15 bp, Homo sapiens
cagccccaaccccac

SEQ ID NO: 43785 - DNA, 15 bp, Homo sapiens
agccccaaccccacc

SEQ ID NO: 43786 - DNA, 15 bp, Homo sapiens
gccccaaccccacct

SEQ ID NO: 43787 - DNA, 15 bp, Homo sapiens
ccccaaccccacctg

SEQ ID NO: 43788 - DNA, 15 bp, Homo sapiens
cccaaccccacctgc

SEQ ID NO: 43789 - DNA, 15 bp, Homo sapiens
ccaaccccacctgca

SEQ ID NO: 43790 - DNA, 15 bp, Homo sapiens
caaccccacctgcag

SEQ ID NO: 43791 - DNA, 15 bp, Homo sapiens
aaccccacctgcagc

SEQ ID NO: 43792 - DNA, 15 bp, Homo sapiens
accccacctgcagct

SEQ ID NO: 43793 - DNA, 15 bp, Homo sapiens
ccccacctgcagctt

SEQ ID NO: 43794 - DNA, 15 bp, Homo sapiens
cccacctgcagcttg

SEQ ID NO: 43795 - DNA, 15 bp, Homo sapiens
ccacctgcagcttgg

SEQ ID NO: 43796 - DNA, 15 bp, Homo sapiens
cacctgcagcttggc

SEQ ID NO: 43797 - DNA, 15 bp, Homo sapiens
acctgcagcttggca

SEQ ID NO: 43798 - DNA, 15 bp, Homo sapiens
cctgcagcttggcaa

SEQ ID NO: 43799 - DNA, 15 bp, Homo sapiens
ctgcagcttggcaag

SEQ ID NO: 43800 - DNA, 15 bp, Homo sapiens
tgcagcttggcaagg

SEQ ID NO: 43801 - DNA, 15 bp, Homo sapiens
gcagcttggcaaggt

SEQ ID NO: 43802 - DNA, 15 bp, Homo sapiens
cagcttggcaaggtt

SEQ ID NO: 43803 - DNA, 15 bp, Homo sapiens
agcttggcaaggttg

SEQ ID NO: 43804 - DNA, 15 bp, Homo sapiens
gcttggcaaggttgg

SEQ ID NO: 43805 - DNA, 15 bp, Homo sapiens
cttggcaaggttggc

SEQ ID NO: 43806 - DNA, 15 bp, Homo sapiens
ttggcaaggttggca

SEQ ID NO: 43807 - DNA, 15 bp, Homo sapiens
tggcaaggttggcag

SEQ ID NO: 43808 - DNA, 15 bp, Homo sapiens
ggcaaggttggcagt

SEQ ID NO: 43809 - DNA, 15 bp, Homo sapiens
gcaaggttggcagtc

SEQ ID NO: 43810 - DNA, 15 bp, Homo sapiens
caaggttggcagtcc

SEQ ID NO: 43811 - DNA, 15 bp, Homo sapiens
aaggttggcagtccc

SEQ ID NO: 43812 - DNA, 15 bp, Homo sapiens
aggttggcagtccca

SEQ ID NO: 43813 - DNA, 15 bp, Homo sapiens
ggttggcagtcccat

SEQ ID NO: 43814 - DNA, 15 bp, Homo sapiens
gttggcagtcccatc

SEQ ID NO: 43815 - DNA, 15 bp, Homo sapiens
ttggcagtcccatcg

SEQ ID NO: 43816 - DNA, 15 bp, Homo sapiens
tggcagtcccatcgg

SEQ ID NO: 43817 - DNA, 15 bp, Homo sapiens
ggcagtcccatcggg

SEQ ID NO: 43818 - DNA, 15 bp, Homo sapiens
gcagtcccatcgggc

SEQ ID NO: 43819 - DNA, 15 bp, Homo sapiens
cagtcccatcgggca

SEQ ID NO: 43820 - DNA, 15 bp, Homo sapiens
agtcccatcgggcag

SEQ ID NO: 43821 - DNA, 15 bp, Homo sapiens
gtcccatcgggcagc

SEQ ID NO: 43822 - DNA, 15 bp, Homo sapiens
tcccatcgggcagca

SEQ ID NO: 43823 - DNA, 15 bp, Homo sapiens
cccatcgggcagcag

SEQ ID NO: 43824 - DNA, 15 bp, Homo sapiens
ccatcgggcagcagc

SEQ ID NO: 43825 - DNA, 15 bp, Homo sapiens
catcgggcagcagct

SEQ ID NO: 43826 - DNA, 15 bp, Homo sapiens
atcgggcagcagctc

SEQ ID NO: 43827 - DNA, 15 bp, Homo sapiens
tcgggcagcagctcc

SEQ ID NO: 43828 - DNA, 15 bp, Homo sapiens
cgggcagcagctcca

SEQ ID NO: 43829 - DNA, 15 bp, Homo sapiens
gggcagcagctccac

SEQ ID NO: 43830 - DNA, 15 bp, Homo sapiens
ggcagcagctccacc

SEQ ID NO: 43831 - DNA, 15 bp, Homo sapiens
gcagcagctccaccg

SEQ ID NO: 43832 - DNA, 15 bp, Homo sapiens
cagcagctccaccgc

SEQ ID NO: 43833 - DNA, 15 bp, Homo sapiens
agcagctccaccgcg

SEQ ID NO: 43834 - DNA, 15 bp, Homo sapiens
gcagctccaccgcgc

SEQ ID NO: 43835 - DNA, 15 bp, Homo sapiens
cagctccaccgcgcg

SEQ ID NO: 43836 - DNA, 15 bp, Homo sapiens
agctccaccgcgcgg

SEQ ID NO: 43837 - DNA, 15 bp, Homo sapiens
gctccaccgcgcggc

SEQ ID NO: 43838 - DNA, 15 bp, Homo sapiens
ctccaccgcgcggct

SEQ ID NO: 43839 - DNA, 15 bp, Homo sapiens
tccaccgcgcggctc

SEQ ID NO: 43840 - DNA, 15 bp, Homo sapiens
ccaccgcgcggctct

SEQ ID NO: 43841 - DNA, 15 bp, Homo sapiens
caccgcgcggctctt

SEQ ID NO: 43842 - DNA, 15 bp, Homo sapiens
accgcgcggctcttc

SEQ ID NO: 43843 - DNA, 15 bp, Homo sapiens
ccgcgcggctcttca

SEQ ID NO: 43844 - DNA, 15 bp, Homo sapiens
cgcgcggctcttcag

SEQ ID NO: 43845 - DNA, 15 bp, Homo sapiens
gcgcggctcttcagg

SEQ ID NO: 43846 - DNA, 15 bp, Homo sapiens
cgcggctcttcaggc

SEQ ID NO: 43847 - DNA, 15 bp, Homo sapiens
gcggctcttcaggcg

SEQ ID NO: 43848 - DNA, 15 bp, Homo sapiens
cggctcttcaggcgc

SEQ ID NO: 43849 - DNA, 15 bp, Homo sapiens
ggctcttcaggcgca

SEQ ID NO: 43850 - DNA, 15 bp, Homo sapiens
gctcttcaggcgcag

SEQ ID NO: 43851 - DNA, 15 bp, Homo sapiens
ctcttcaggcgcagg

SEQ ID NO: 43852 - DNA, 15 bp, Homo sapiens
tcttcaggcgcaggg

SEQ ID NO: 43853 - DNA, 15 bp, Homo sapiens
cttcaggcgcagggc

SEQ ID NO: 43854 - DNA, 15 bp, Homo sapiens
ttcaggcgcagggcc

SEQ ID NO: 43855 - DNA, 15 bp, Homo sapiens
tcaggcgcagggcct

SEQ ID NO: 43856 - DNA, 15 bp, Homo sapiens
caggcgcagggcctg

SEQ ID NO: 43857 - DNA, 15 bp, Homo sapiens
aggcgcagggcctgc

SEQ ID NO: 43858 - DNA, 15 bp, Homo sapiens
ggcgcagggcctgct

SEQ ID NO: 43859 - DNA, 15 bp, Homo sapiens
gcgcagggcctgctc

SEQ ID NO: 43860 - DNA, 15 bp, Homo sapiens
cgcagggcctgctca

SEQ ID NO: 43861 - DNA, 15 bp, Homo sapiens
gcagggcctgctcac

SEQ ID NO: 43862 - DNA, 15 bp, Homo sapiens
cagggcctgctcacg

SEQ ID NO: 43863 - DNA, 15 bp, Homo sapiens
agggcctgctcacgc

SEQ ID NO: 43864 - DNA, 15 bp, Homo sapiens
gggcctgctcacgct

SEQ ID NO: 43865 - DNA, 15 bp, Homo sapiens
ggcctgctcacgctc

SEQ ID NO: 43866 - DNA, 15 bp, Homo sapiens
gcctgctcacgctct

SEQ ID NO: 43867 - DNA, 15 bp, Homo sapiens
cctgctcacgctctg

SEQ ID NO: 43868 - DNA, 15 bp, Homo sapiens
ctgctcacgctctgc

SEQ ID NO: 43869 - DNA, 15 bp, Homo sapiens
tgctcacgctctgct

SEQ ID NO: 43870 - DNA, 15 bp, Homo sapiens
gctcacgctctgctg

SEQ ID NO: 43871 - DNA, 15 bp, Homo sapiens
ctcacgctctgctgt

SEQ ID NO: 43872 - DNA, 15 bp, Homo sapiens
tcacgctctgctgta

SEQ ID NO: 43873 - DNA, 15 bp, Homo sapiens
cacgctctgctgtac

SEQ ID NO: 43874 - DNA, 15 bp, Homo sapiens
acgctctgctgtact

SEQ ID NO: 43875 - DNA, 15 bp, Homo sapiens
cgctctgctgtactg

SEQ ID NO: 43876 - DNA, 15 bp, Homo sapiens
gctctgctgtactga

SEQ ID NO: 43877 - DNA, 15 bp, Homo sapiens
ctctgctgtactgag

SEQ ID NO: 43878 - DNA, 15 bp, Homo sapiens
tctgctgtactgagc

SEQ ID NO: 43879 - DNA, 15 bp, Homo sapiens
ctgctgtactgagct

SEQ ID NO: 43880 - DNA, 15 bp, Homo sapiens
tgctgtactgagctt

SEQ ID NO: 43881 - DNA, 15 bp, Homo sapiens
gctgtactgagcttg

SEQ ID NO: 43882 - DNA, 15 bp, Homo sapiens
ctgtactgagcttgc

SEQ ID NO: 43883 - DNA, 15 bp, Homo sapiens
tgtactgagcttgct

SEQ ID NO: 43884 - DNA, 15 bp, Homo sapiens
gtactgagcttgctg

SEQ ID NO: 43885 - DNA, 15 bp, Homo sapiens
tactgagcttgctgt

SEQ ID NO: 43886 - DNA, 15 bp, Homo sapiens
actgagcttgctgtg

SEQ ID NO: 43887 - DNA, 15 bp, Homo sapiens
ctgagcttgctgtgc

SEQ ID NO: 43888 - DNA, 15 bp, Homo sapiens
tgagcttgctgtgcc

SEQ ID NO: 43889 - DNA, 15 bp, Homo sapiens
gagcttgctgtgccg

SEQ ID NO: 43890 - DNA, 15 bp, Homo sapiens
agcttgctgtgccgg

SEQ ID NO: 43891 - DNA, 15 bp, Homo sapiens
gcttgctgtgccggc

SEQ ID NO: 43892 - DNA, 15 bp, Homo sapiens
cttgctgtgccggca

SEQ ID NO: 43893 - DNA, 15 bp, Homo sapiens
ttgctgtgccggcac

SEQ ID NO: 43894 - DNA, 15 bp, Homo sapiens
tgctgtgccggcact

SEQ ID NO: 43895 - DNA, 15 bp, Homo sapiens
gctgtgccggcactc

SEQ ID NO: 43896 - DNA, 15 bp, Homo sapiens
ctgtgccggcactca

SEQ ID NO: 43897 - DNA, 15 bp, Homo sapiens
tgtgccggcactcag

SEQ ID NO: 43898 - DNA, 15 bp, Homo sapiens
gtgccggcactcaga

SEQ ID NO: 43899 - DNA, 15 bp, Homo sapiens
tgccggcactcagac

SEQ ID NO: 43900 - DNA, 15 bp, Homo sapiens
gccggcactcagact

SEQ ID NO: 43901 - DNA, 15 bp, Homo sapiens
ccggcactcagactc

SEQ ID NO: 43902 - DNA, 15 bp, Homo sapiens
cggcactcagactct

SEQ ID NO: 43903 - DNA, 15 bp, Homo sapiens
ggcactcagactctg

SEQ ID NO: 43904 - DNA, 15 bp, Homo sapiens
gcactcagactctgc

SEQ ID NO: 43905 - DNA, 15 bp, Homo sapiens
cactcagactctgcc

SEQ ID NO: 43906 - DNA, 15 bp, Homo sapiens
actcagactctgcct

SEQ ID NO: 43907 - DNA, 15 bp, Homo sapiens
ctcagactctgcctg

SEQ ID NO: 43908 - DNA, 15 bp, Homo sapiens
tcagactctgcctgg

SEQ ID NO: 43909 - DNA, 15 bp, Homo sapiens
cagactctgcctggc

SEQ ID NO: 43910 - DNA, 15 bp, Homo sapiens
agactctgcctggcc

SEQ ID NO: 43911 - DNA, 15 bp, Homo sapiens
gactctgcctggccg

SEQ ID NO: 43912 - DNA, 15 bp, Homo sapiens
actctgcctggccgg

SEQ ID NO: 43913 - DNA, 15 bp, Homo sapiens
ctctgcctggccggt

SEQ ID NO: 43914 - DNA, 15 bp, Homo sapiens
tctgcctggccggtg

SEQ ID NO: 43915 - DNA, 15 bp, Homo sapiens
ctgcctggccggtgg

SEQ ID NO: 43916 - DNA, 15 bp, Homo sapiens
tgcctggccggtgga

SEQ ID NO: 43917 - DNA, 15 bp, Homo sapiens
gcctggccggtggat

SEQ ID NO: 43918 - DNA, 15 bp, Homo sapiens
cctggccggtggata

SEQ ID NO: 43919 - DNA, 15 bp, Homo sapiens
ctggccggtggatac

SEQ ID NO: 43920 - DNA, 15 bp, Homo sapiens
tggccggtggatacc

SEQ ID NO: 43921 - DNA, 15 bp, Homo sapiens
ggccggtggataccc

SEQ ID NO: 43922 - DNA, 15 bp, Homo sapiens
gccggtggataccca

SEQ ID NO: 43923 - DNA, 15 bp, Homo sapiens
ccggtggatacccag

SEQ ID NO: 43924 - DNA, 15 bp, Homo sapiens
cggtggatacccagt

SEQ ID NO: 43925 - DNA, 15 bp, Homo sapiens
ggtggatacccagtc

SEQ ID NO: 43926 - DNA, 15 bp, Homo sapiens
gtggatacccagtca

SEQ ID NO: 43927 - DNA, 15 bp, Homo sapiens
tggatacccagtcac

SEQ ID NO: 43928 - DNA, 15 bp, Homo sapiens
ggatacccagtcaca

SEQ ID NO: 43929 - DNA, 15 bp, Homo sapiens
gatacccagtcacat

SEQ ID NO: 43930 - DNA, 15 bp, Homo sapiens
atacccagtcacatg

SEQ ID NO: 43931 - DNA, 15 bp, Homo sapiens
tacccagtcacatgc

SEQ ID NO: 43932 - DNA, 15 bp, Homo sapiens
acccagtcacatgcc

SEQ ID NO: 43933 - DNA, 15 bp, Homo sapiens
cccagtcacatgcca

SEQ ID NO: 43934 - DNA, 15 bp, Homo sapiens
ccagtcacatgccac

SEQ ID NO: 43935 - DNA, 15 bp, Homo sapiens
cagtcacatgccaca

SEQ ID NO: 43936 - DNA, 15 bp, Homo sapiens
agtcacatgccacag

SEQ ID NO: 43937 - DNA, 15 bp, Homo sapiens
gtcacatgccacagc

SEQ ID NO: 43938 - DNA, 15 bp, Homo sapiens
tcacatgccacagcc

SEQ ID NO: 43939 - DNA, 15 bp, Homo sapiens
cacatgccacagccc

SEQ ID NO: 43940 - DNA, 15 bp, Homo sapiens
acatgccacagcccc

SEQ ID NO: 43941 - DNA, 15 bp, Homo sapiens
catgccacagccccc

SEQ ID NO: 43942 - DNA, 15 bp, Homo sapiens
atgccacagccccca

SEQ ID NO: 43943 - DNA, 15 bp, Homo sapiens
tgccacagcccccat

SEQ ID NO: 43944 - DNA, 15 bp, Homo sapiens
gccacagcccccatg

SEQ ID NO: 43945 - DNA, 15 bp, Homo sapiens
ccacagcccccatgg

SEQ ID NO: 43946 - DNA, 15 bp, Homo sapiens
cacagcccccatgga

SEQ ID NO: 43947 - DNA, 15 bp, Homo sapiens
acagcccccatggag

SEQ ID NO: 43948 - DNA, 15 bp, Homo sapiens
cagcccccatggagc

SEQ ID NO: 43949 - DNA, 15 bp, Homo sapiens
agcccccatggagct

SEQ ID NO: 43950 - DNA, 15 bp, Homo sapiens
gcccccatggagctc

SEQ ID NO: 43951 - DNA, 15 bp, Homo sapiens
cccccatggagctcc

SEQ ID NO: 43952 - DNA, 15 bp, Homo sapiens
ccccatggagctcca

SEQ ID NO: 43953 - DNA, 15 bp, Homo sapiens
cccatggagctccac

SEQ ID NO: 43954 - DNA, 15 bp, Homo sapiens
ccatggagctccaca

SEQ ID NO: 43955 - DNA, 15 bp, Homo sapiens
catggagctccacag

SEQ ID NO: 43956 - DNA, 15 bp, Homo sapiens
atggagctccacaga

SEQ ID NO: 43957 - DNA, 15 bp, Homo sapiens
tggagctccacagat

SEQ ID NO: 43958 - DNA, 15 bp, Homo sapiens
ggagctccacagatg

SEQ ID NO: 43959 - DNA, 15 bp, Homo sapiens
gagctccacagatga

SEQ ID NO: 43960 - DNA, 15 bp, Homo sapiens
agctccacagatgac

SEQ ID NO: 43961 - DNA, 15 bp, Homo sapiens
gctccacagatgact

SEQ ID NO: 43962 - DNA, 15 bp, Homo sapiens
ctccacagatgactg

SEQ ID NO: 43963 - DNA, 15 bp, Homo sapiens
tccacagatgactgt

SEQ ID NO: 43964 - DNA, 15 bp, Homo sapiens
ccacagatgactgta

SEQ ID NO: 43965 - DNA, 15 bp, Homo sapiens
cacagatgactgtac

SEQ ID NO: 43966 - DNA, 15 bp, Homo sapiens
acagatgactgtaca

SEQ ID NO: 43967 - DNA, 15 bp, Homo sapiens
cagatgactgtacac

SEQ ID NO: 43968 - DNA, 15 bp, Homo sapiens
agatgactgtacacc

SEQ ID NO: 43969 - DNA, 15 bp, Homo sapiens
gatgactgtacaccc

SEQ ID NO: 43970 - DNA, 15 bp, Homo sapiens
atgactgtacacccc

SEQ ID NO: 43971 - DNA, 15 bp, Homo sapiens
tgactgtacacccct

SEQ ID NO: 43972 - DNA, 15 bp, Homo sapiens
gactgtacacccctg

SEQ ID NO: 43973 - DNA, 15 bp, Homo sapiens
actgtacacccctgt

SEQ ID NO: 43974 - DNA, 15 bp, Homo sapiens
ctgtacacccctgtg

SEQ ID NO: 43975 - DNA, 15 bp, Homo sapiens
tgtacacccctgtgg

SEQ ID NO: 43976 - DNA, 15 bp, Homo sapiens
gtacacccctgtggc

SEQ ID NO: 43977 - DNA, 15 bp, Homo sapiens
tacacccctgtggcc

SEQ ID NO: 43978 - DNA, 15 bp, Homo sapiens
acacccctgtggccc

SEQ ID NO: 43979 - DNA, 15 bp, Homo sapiens
cacccctgtggcccc

SEQ ID NO: 43980 - DNA, 15 bp, Homo sapiens
acccctgtggccccc

SEQ ID NO: 43981 - DNA, 15 bp, Homo sapiens
cccctgtggccccca

SEQ ID NO: 43982 - DNA, 15 bp, Homo sapiens
ccctgtggcccccac

SEQ ID NO: 43983 - DNA, 15 bp, Homo sapiens
cctgtggcccccaca

SEQ ID NO: 43984 - DNA, 15 bp, Homo sapiens
ctgtggcccccacag

SEQ ID NO: 43985 - DNA, 15 bp, Homo sapiens
tgtggcccccacagg

SEQ ID NO: 43986 - DNA, 15 bp, Homo sapiens
gtggcccccacaggc

SEQ ID NO: 43987 - DNA, 15 bp, Homo sapiens
tggcccccacaggcc

SEQ ID NO: 43988 - DNA, 15 bp, Homo sapiens
ggcccccacaggcct

SEQ ID NO: 43989 - DNA, 15 bp, Homo sapiens
gcccccacaggcctc

SEQ ID NO: 43990 - DNA, 15 bp, Homo sapiens
cccccacaggcctct

SEQ ID NO: 43991 - DNA, 15 bp, Homo sapiens
ccccacaggcctctc

SEQ ID NO: 43992 - DNA, 15 bp, Homo sapiens
cccacaggcctctct

SEQ ID NO: 43993 - DNA, 15 bp, Homo sapiens
ccacaggcctctcta

SEQ ID NO: 43994 - DNA, 15 bp, Homo sapiens
cacaggcctctctaa

SEQ ID NO: 43995 - DNA, 15 bp, Homo sapiens
acaggcctctctaac

SEQ ID NO: 43996 - DNA, 15 bp, Homo sapiens
caggcctctctaaca

SEQ ID NO: 43997 - DNA, 15 bp, Homo sapiens
aggcctctctaacag

SEQ ID NO: 43998 - DNA, 15 bp, Homo sapiens
ggcctctctaacagc

SEQ ID NO: 43999 - DNA, 15 bp, Homo sapiens
gcctctctaacagct

SEQ ID NO: 44000 - DNA, 15 bp, Homo sapiens
cctctctaacagctc

SEQ ID NO: 44001 - DNA, 15 bp, Homo sapiens
ctctctaacagctcc

SEQ ID NO: 44002 - DNA, 15 bp, Homo sapiens
tctctaacagctcca

SEQ ID NO: 44003 - DNA, 15 bp, Homo sapiens
ctctaacagctccac

SEQ ID NO: 44004 - DNA, 15 bp, Homo sapiens
tctaacagctccacg

SEQ ID NO: 44005 - DNA, 15 bp, Homo sapiens
ctaacagctccacgc

SEQ ID NO: 44006 - DNA, 15 bp, Homo sapiens
taacagctccacgct

SEQ ID NO: 44007 - DNA, 15 bp, Homo sapiens
aacagctccacgctg

SEQ ID NO: 44008 - DNA, 15 bp, Homo sapiens
acagctccacgctgg

SEQ ID NO: 44009 - DNA, 15 bp, Homo sapiens
cagctccacgctggt

SEQ ID NO: 44010 - DNA, 15 bp, Homo sapiens
agctccacgctggtg

SEQ ID NO: 44011 - DNA, 15 bp, Homo sapiens
gctccacgctggtgc

SEQ ID NO: 44012 - DNA, 15 bp, Homo sapiens
ctccacgctggtgcc

SEQ ID NO: 44013 - DNA, 15 bp, Homo sapiens
tccacgctggtgcca

SEQ ID NO: 44014 - DNA, 15 bp, Homo sapiens
ccacgctggtgccaa

SEQ ID NO: 44015 - DNA, 15 bp, Homo sapiens
cacgctggtgccaag

SEQ ID NO: 44016 - DNA, 15 bp, Homo sapiens
acgctggtgccaagg

SEQ ID NO: 44017 - DNA, 15 bp, Homo sapiens
cgctggtgccaagga

SEQ ID NO: 44018 - DNA, 15 bp, Homo sapiens
gctggtgccaaggac

SEQ ID NO: 44019 - DNA, 15 bp, Homo sapiens
ctggtgccaaggacc

SEQ ID NO: 44020 - DNA, 15 bp, Homo sapiens
tggtgccaaggaccc

SEQ ID NO: 44021 - DNA, 15 bp, Homo sapiens
ggtgccaaggacccc

SEQ ID NO: 44022 - DNA, 15 bp, Homo sapiens
gtgccaaggaccccg

SEQ ID NO: 44023 - DNA, 15 bp, Homo sapiens
tgccaaggaccccga

SEQ ID NO: 44024 - DNA, 15 bp, Homo sapiens
gccaaggaccccgag

SEQ ID NO: 44025 - DNA, 15 bp, Homo sapiens
ccaaggaccccgagg

SEQ ID NO: 44026 - DNA, 15 bp, Homo sapiens
caaggaccccgagga

SEQ ID NO: 44027 - DNA, 15 bp, Homo sapiens
aaggaccccgaggac

SEQ ID NO: 44028 - DNA, 15 bp, Homo sapiens
aggaccccgaggacc

SEQ ID NO: 44029 - DNA, 15 bp, Homo sapiens
ggaccccgaggaccc

SEQ ID NO: 44030 - DNA, 15 bp, Homo sapiens
gaccccgaggacccc

SEQ ID NO: 44031 - DNA, 15 bp, Homo sapiens
accccgaggaccccc

SEQ ID NO: 44032 - DNA, 15 bp, Homo sapiens
ccccgaggaccccct

SEQ ID NO: 44033 - DNA, 15 bp, Homo sapiens
cccgaggacccccta

SEQ ID NO: 44034 - DNA, 15 bp, Homo sapiens
ccgaggaccccctaa

SEQ ID NO: 44035 - DNA, 15 bp, Homo sapiens
cgaggaccccctaat

SEQ ID NO: 44036 - DNA, 15 bp, Homo sapiens
gaggaccccctaatc

SEQ ID NO: 44037 - DNA, 15 bp, Homo sapiens
aggaccccctaatcc

SEQ ID NO: 44038 - DNA, 15 bp, Homo sapiens
ggaccccctaatccc

SEQ ID NO: 44039 - DNA, 15 bp, Homo sapiens
gaccccctaatcccc

SEQ ID NO: 44040 - DNA, 15 bp, Homo sapiens
accccctaatcccct

SEQ ID NO: 44041 - DNA, 15 bp, Homo sapiens
ccccctaatcccctg

SEQ ID NO: 44042 - DNA, 15 bp, Homo sapiens
cccctaatcccctgt

SEQ ID NO: 44043 - DNA, 15 bp, Homo sapiens
ccctaatcccctgtc

SEQ ID NO: 44044 - DNA, 15 bp, Homo sapiens
cctaatcccctgtcc

SEQ ID NO: 44045 - DNA, 15 bp, Homo sapiens
ctaatcccctgtcca

SEQ ID NO: 44046 - DNA, 15 bp, Homo sapiens
taatcccctgtccat

SEQ ID NO: 44047 - DNA, 15 bp, Homo sapiens
aatcccctgtccatg

SEQ ID NO: 44048 - DNA, 15 bp, Homo sapiens
atcccctgtccatgc

SEQ ID NO: 44049 - DNA, 15 bp, Homo sapiens
tcccctgtccatgca

SEQ ID NO: 44050 - DNA, 15 bp, Homo sapiens
cccctgtccatgcag

SEQ ID NO: 44051 - DNA, 15 bp, Homo sapiens
ccctgtccatgcaga

SEQ ID NO: 44052 - DNA, 15 bp, Homo sapiens
cctgtccatgcagac

SEQ ID NO: 44053 - DNA, 15 bp, Homo sapiens
ctgtccatgcagacc

SEQ ID NO: 44054 - DNA, 15 bp, Homo sapiens
tgtccatgcagaccc

SEQ ID NO: 44055 - DNA, 15 bp, Homo sapiens
gtccatgcagacccg

SEQ ID NO: 44056 - DNA, 15 bp, Homo sapiens
tccatgcagacccgt

SEQ ID NO: 44057 - DNA, 15 bp, Homo sapiens
ccatgcagacccgtg

SEQ ID NO: 44058 - DNA, 15 bp, Homo sapiens
catgcagacccgtgg

SEQ ID NO: 44059 - DNA, 15 bp, Homo sapiens
atgcagacccgtggg

SEQ ID NO: 44060 - DNA, 15 bp, Homo sapiens
tgcagacccgtgggt

SEQ ID NO: 44061 - DNA, 15 bp, Homo sapiens
gcagacccgtgggta

SEQ ID NO: 44062 - DNA, 15 bp, Homo sapiens
cagacccgtgggtac

SEQ ID NO: 44063 - DNA, 15 bp, Homo sapiens
agacccgtgggtacc

SEQ ID NO: 44064 - DNA, 15 bp, Homo sapiens
gacccgtgggtaccc

SEQ ID NO: 44065 - DNA, 15 bp, Homo sapiens
acccgtgggtacccc

SEQ ID NO: 44066 - DNA, 15 bp, Homo sapiens
cccgtgggtacccca

SEQ ID NO: 44067 - DNA, 15 bp, Homo sapiens
ccgtgggtaccccac

SEQ ID NO: 44068 - DNA, 15 bp, Homo sapiens
cgtgggtaccccaca

SEQ ID NO: 44069 - DNA, 15 bp, Homo sapiens
gtgggtaccccacag

SEQ ID NO: 44070 - DNA, 15 bp, Homo sapiens
tgggtaccccacaga

SEQ ID NO: 44071 - DNA, 15 bp, Homo sapiens
gggtaccccacagat

SEQ ID NO: 44072 - DNA, 15 bp, Homo sapiens
ggtaccccacagatg

SEQ ID NO: 44073 - DNA, 15 bp, Homo sapiens
gtaccccacagatgc

SEQ ID NO: 44074 - DNA, 15 bp, Homo sapiens
taccccacagatgcc

SEQ ID NO: 44075 - DNA, 15 bp, Homo sapiens
accccacagatgccc

SEQ ID NO: 44076 - DNA, 15 bp, Homo sapiens
ccccacagatgccca

SEQ ID NO: 44077 - DNA, 15 bp, Homo sapiens
cccacagatgcccac

SEQ ID NO: 44078 - DNA, 15 bp, Homo sapiens
ccacagatgcccaca

SEQ ID NO: 44079 - DNA, 15 bp, Homo sapiens
cacagatgcccacag

SEQ ID NO: 44080 - DNA, 15 bp, Homo sapiens
acagatgcccacaga

SEQ ID NO: 44081 - DNA, 15 bp, Homo sapiens
cagatgcccacagac

SEQ ID NO: 44082 - DNA, 15 bp, Homo sapiens
agatgcccacagacc

SEQ ID NO: 44083 - DNA, 15 bp, Homo sapiens
gatgcccacagaccc

SEQ ID NO: 44084 - DNA, 15 bp, Homo sapiens
atgcccacagaccct

SEQ ID NO: 44085 - DNA, 15 bp, Homo sapiens
tgcccacagaccctc

SEQ ID NO: 44086 - DNA, 15 bp, Homo sapiens
gcccacagaccctcc

SEQ ID NO: 44087 - DNA, 15 bp, Homo sapiens
cccacagaccctccg

SEQ ID NO: 44088 - DNA, 15 bp, Homo sapiens
ccacagaccctccga

SEQ ID NO: 44089 - DNA, 15 bp, Homo sapiens
cacagaccctccgag

SEQ ID NO: 44090 - DNA, 15 bp, Homo sapiens
acagaccctccgagg

SEQ ID NO: 44091 - DNA, 15 bp, Homo sapiens
cagaccctccgagga

SEQ ID NO: 44092 - DNA, 15 bp, Homo sapiens
agaccctccgaggac

SEQ ID NO: 44093 - DNA, 15 bp, Homo sapiens
gaccctccgaggacc

SEQ ID NO: 44094 - DNA, 15 bp, Homo sapiens
accctccgaggaccc

SEQ ID NO: 44095 - DNA, 15 bp, Homo sapiens
ccctccgaggacccc

SEQ ID NO: 44096 - DNA, 15 bp, Homo sapiens
cctccgaggacccct

SEQ ID NO: 44097 - DNA, 15 bp, Homo sapiens
ctccgaggacccctc

SEQ ID NO: 44098 - DNA, 15 bp, Homo sapiens
tccgaggacccctca

SEQ ID NO: 44099 - DNA, 15 bp, Homo sapiens
ccgaggacccctcaa

SEQ ID NO: 44100 - DNA, 15 bp, Homo sapiens
cgaggacccctcaat

SEQ ID NO: 44101 - DNA, 15 bp, Homo sapiens
gaggacccctcaatc

SEQ ID NO: 44102 - DNA, 15 bp, Homo sapiens
aggacccctcaatcc

SEQ ID NO: 44103 - DNA, 15 bp, Homo sapiens
ggacccctcaatccc

SEQ ID NO: 44104 - DNA, 15 bp, Homo sapiens
gacccctcaatcccc

SEQ ID NO: 44105 - DNA, 15 bp, Homo sapiens
acccctcaatcccct

SEQ ID NO: 44106 - DNA, 15 bp, Homo sapiens
cccctcaatcccctg

SEQ ID NO: 44107 - DNA, 15 bp, Homo sapiens
ccctcaatcccctgc

SEQ ID NO: 44108 - DNA, 15 bp, Homo sapiens
cctcaatcccctgcc

SEQ ID NO: 44109 - DNA, 15 bp, Homo sapiens
ctcaatcccctgccc

SEQ ID NO: 44110 - DNA, 15 bp, Homo sapiens
tcaatcccctgccca

SEQ ID NO: 44111 - DNA, 15 bp, Homo sapiens
caatcccctgcccat

SEQ ID NO: 44112 - DNA, 15 bp, Homo sapiens
aatcccctgcccatg

SEQ ID NO: 44113 - DNA, 15 bp, Homo sapiens
atcccctgcccatgc

SEQ ID NO: 44114 - DNA, 15 bp, Homo sapiens
tcccctgcccatgca

SEQ ID NO: 44115 - DNA, 15 bp, Homo sapiens
cccctgcccatgcag

SEQ ID NO: 44116 - DNA, 15 bp, Homo sapiens
ccctgcccatgcaga

SEQ ID NO: 44117 - DNA, 15 bp, Homo sapiens
cctgcccatgcagac

SEQ ID NO: 44118 - DNA, 15 bp, Homo sapiens
ctgcccatgcagacc

SEQ ID NO: 44119 - DNA, 15 bp, Homo sapiens
tgcccatgcagaccc

SEQ ID NO: 44120 - DNA, 15 bp, Homo sapiens
gcccatgcagacccg

SEQ ID NO: 44121 - DNA, 15 bp, Homo sapiens
cccatgcagacccgc

SEQ ID NO: 44122 - DNA, 15 bp, Homo sapiens
ccatgcagacccgcg

SEQ ID NO: 44123 - DNA, 15 bp, Homo sapiens
catgcagacccgcgg

SEQ ID NO: 44124 - DNA, 15 bp, Homo sapiens
atgcagacccgcggt

SEQ ID NO: 44125 - DNA, 15 bp, Homo sapiens
tgcagacccgcggtg

SEQ ID NO: 44126 - DNA, 15 bp, Homo sapiens
gcagacccgcggtgc

SEQ ID NO: 44127 - DNA, 15 bp, Homo sapiens
cagacccgcggtgcc

SEQ ID NO: 44128 - DNA, 15 bp, Homo sapiens
agacccgcggtgccc

SEQ ID NO: 44129 - DNA, 15 bp, Homo sapiens
gacccgcggtgcccc

SEQ ID NO: 44130 - DNA, 15 bp, Homo sapiens
acccgcggtgcccca

SEQ ID NO: 44131 - DNA, 15 bp, Homo sapiens
cccgcggtgccccat

SEQ ID NO: 44132 - DNA, 15 bp, Homo sapiens
ccgcggtgccccata

SEQ ID NO: 44133 - DNA, 15 bp, Homo sapiens
cgcggtgccccatag

SEQ ID NO: 44134 - DNA, 15 bp, Homo sapiens
gcggtgccccataga

SEQ ID NO: 44135 - DNA, 15 bp, Homo sapiens
cggtgccccatagat

SEQ ID NO: 44136 - DNA, 15 bp, Homo sapiens
ggtgccccatagatg

SEQ ID NO: 44137 - DNA, 15 bp, Homo sapiens
gtgccccatagatgc

SEQ ID NO: 44138 - DNA, 15 bp, Homo sapiens
tgccccatagatgcc

SEQ ID NO: 44139 - DNA, 15 bp, Homo sapiens
gccccatagatgccc

SEQ ID NO: 44140 - DNA, 15 bp, Homo sapiens
ccccatagatgccca

SEQ ID NO: 44141 - DNA, 15 bp, Homo sapiens
cccatagatgcccac

SEQ ID NO: 44142 - DNA, 15 bp, Homo sapiens
ccatagatgcccaca

SEQ ID NO: 44143 - DNA, 15 bp, Homo sapiens
catagatgcccacag

SEQ ID NO: 44144 - DNA, 15 bp, Homo sapiens
atagatgcccacaga

SEQ ID NO: 44145 - DNA, 15 bp, Homo sapiens
tagatgcccacagac

SEQ ID NO: 44146 - DNA, 15 bp, Homo sapiens
gcccacagaccctca

SEQ ID NO: 44147 - DNA, 15 bp, Homo sapiens
cccacagaccctcac

SEQ ID NO: 44148 - DNA, 15 bp, Homo sapiens
ccacagaccctcacc

SEQ ID NO: 44149 - DNA, 15 bp, Homo sapiens
cacagaccctcaccc

SEQ ID NO: 44150 - DNA, 15 bp, Homo sapiens
acagaccctcaccct

SEQ ID NO: 44151 - DNA, 15 bp, Homo sapiens
cagaccctcaccctg

SEQ ID NO: 44152 - DNA, 15 bp, Homo sapiens
agaccctcaccctgg

SEQ ID NO: 44153 - DNA, 15 bp, Homo sapiens
gaccctcaccctggc

SEQ ID NO: 44154 - DNA, 15 bp, Homo sapiens
accctcaccctggcc

SEQ ID NO: 44155 - DNA, 15 bp, Homo sapiens
ccctcaccctggcct

SEQ ID NO: 44156 - DNA, 15 bp, Homo sapiens
cctcaccctggcctg

SEQ ID NO: 44157 - DNA, 15 bp, Homo sapiens
ctcaccctggcctga

SEQ ID NO: 44158 - DNA, 15 bp, Homo sapiens
tcaccctggcctgat

SEQ ID NO: 44159 - DNA, 15 bp, Homo sapiens
caccctggcctgatt

SEQ ID NO: 44160 - DNA, 15 bp, Homo sapiens
accctggcctgattc

SEQ ID NO: 44161 - DNA, 15 bp, Homo sapiens
ccctggcctgattct

SEQ ID NO: 44162 - DNA, 15 bp, Homo sapiens
cctggcctgattctc

SEQ ID NO: 44163 - DNA, 15 bp, Homo sapiens
ctggcctgattctca

SEQ ID NO: 44164 - DNA, 15 bp, Homo sapiens
tggcctgattctcat

SEQ ID NO: 44165 - DNA, 15 bp, Homo sapiens
ggcctgattctcata

SEQ ID NO: 44166 - DNA, 15 bp, Homo sapiens
gcctgattctcatag

SEQ ID NO: 44167 - DNA, 15 bp, Homo sapiens
cctgattctcatagc

SEQ ID NO: 44168 - DNA, 15 bp, Homo sapiens
ctgattctcatagcc

SEQ ID NO: 44169 - DNA, 15 bp, Homo sapiens
tgattctcatagcca

SEQ ID NO: 44170 - DNA, 15 bp, Homo sapiens
gattctcatagccac

SEQ ID NO: 44171 - DNA, 15 bp, Homo sapiens
attctcatagccacc

SEQ ID NO: 44172 - DNA, 15 bp, Homo sapiens
ttctcatagccaccc

SEQ ID NO: 44173 - DNA, 15 bp, Homo sapiens
tctcatagccaccct

SEQ ID NO: 44174 - DNA, 15 bp, Homo sapiens
ctcatagccaccctc

SEQ ID NO: 44175 - DNA, 15 bp, Homo sapiens
tcatagccaccctca

SEQ ID NO: 44176 - DNA, 15 bp, Homo sapiens
catagccaccctcaa

SEQ ID NO: 44177 - DNA, 15 bp, Homo sapiens
atagccaccctcaag

SEQ ID NO: 44178 - DNA, 15 bp, Homo sapiens
tagccaccctcaaga

SEQ ID NO: 44179 - DNA, 15 bp, Homo sapiens
agccaccctcaagag

SEQ ID NO: 44180 - DNA, 15 bp, Homo sapiens
gccaccctcaagagg

SEQ ID NO: 44181 - DNA, 15 bp, Homo sapiens
ccaccctcaagaggc

SEQ ID NO: 44182 - DNA, 15 bp, Homo sapiens
caccctcaagaggcc

SEQ ID NO: 44183 - DNA, 15 bp, Homo sapiens
accctcaagaggccc

SEQ ID NO: 44184 - DNA, 15 bp, Homo sapiens
ccctcaagaggccca

SEQ ID NO: 44185 - DNA, 15 bp, Homo sapiens
cctcaagaggcccac

SEQ ID NO: 44186 - DNA, 15 bp, Homo sapiens
ctcaagaggcccaca

SEQ ID NO: 44187 - DNA, 15 bp, Homo sapiens
tcaagaggcccacag

SEQ ID NO: 44188 - DNA, 15 bp, Homo sapiens
caagaggcccacaga

SEQ ID NO: 44189 - DNA, 15 bp, Homo sapiens
aagaggcccacagat

SEQ ID NO: 44190 - DNA, 15 bp, Homo sapiens
agaggcccacagatc

SEQ ID NO: 44191 - DNA, 15 bp, Homo sapiens
gaggcccacagatcc

SEQ ID NO: 44192 - DNA, 15 bp, Homo sapiens
aggcccacagatccc

SEQ ID NO: 44193 - DNA, 15 bp, Homo sapiens
ggcccacagatccct

SEQ ID NO: 44194 - DNA, 15 bp, Homo sapiens
gcccacagatcccta

SEQ ID NO: 44195 - DNA, 15 bp, Homo sapiens
cccacagatccctaa

SEQ ID NO: 44196 - DNA, 15 bp, Homo sapiens
ccacagatccctaat

SEQ ID NO: 44197 - DNA, 15 bp, Homo sapiens
cacagatccctaatg

SEQ ID NO: 44198 - DNA, 15 bp, Homo sapiens
acagatccctaatgg

SEQ ID NO: 44199 - DNA, 15 bp, Homo sapiens
cagatccctaatggc

SEQ ID NO: 44200 - DNA, 15 bp, Homo sapiens
agatccctaatggct

SEQ ID NO: 44201 - DNA, 15 bp, Homo sapiens
gatccctaatggctc

SEQ ID NO: 44202 - DNA, 15 bp, Homo sapiens
atccctaatggctcc

SEQ ID NO: 44203 - DNA, 15 bp, Homo sapiens
tccctaatggctccc

SEQ ID NO: 44204 - DNA, 15 bp, Homo sapiens
ccctaatggctccca

SEQ ID NO: 44205 - DNA, 15 bp, Homo sapiens
cctaatggctcccag

SEQ ID NO: 44206 - DNA, 15 bp, Homo sapiens
ctaatggctcccagg

SEQ ID NO: 44207 - DNA, 15 bp, Homo sapiens
taatggctcccagga

SEQ ID NO: 44208 - DNA, 15 bp, Homo sapiens
aatggctcccaggaa

SEQ ID NO: 44209 - DNA, 15 bp, Homo sapiens
atggctcccaggaac

SEQ ID NO: 44210 - DNA, 15 bp, Homo sapiens
tggctcccaggaacc

SEQ ID NO: 44211 - DNA, 15 bp, Homo sapiens
ggctcccaggaaccc

SEQ ID NO: 44212 - DNA, 15 bp, Homo sapiens
gctcccaggaaccct

SEQ ID NO: 44213 - DNA, 15 bp, Homo sapiens
ctcccaggaaccctt

SEQ ID NO: 44214 - DNA, 15 bp, Homo sapiens
tcccaggaacccttc

SEQ ID NO: 44215 - DNA, 15 bp, Homo sapiens
cccaggaacccttct

SEQ ID NO: 44216 - DNA, 15 bp, Homo sapiens
ccaggaacccttctg

SEQ ID NO: 44217 - DNA, 15 bp, Homo sapiens
caggaacccttctgc

SEQ ID NO: 44218 - DNA, 15 bp, Homo sapiens
aggaacccttctgcc

SEQ ID NO: 44219 - DNA, 15 bp, Homo sapiens
ggaacccttctgcca

SEQ ID NO: 44220 - DNA, 15 bp, Homo sapiens
gaacccttctgccat

SEQ ID NO: 44221 - DNA, 15 bp, Homo sapiens
aacccttctgccatg

SEQ ID NO: 44222 - DNA, 15 bp, Homo sapiens
acccttctgccatgt

SEQ ID NO: 44223 - DNA, 15 bp, Homo sapiens
cccttctgccatgtg

SEQ ID NO: 44224 - DNA, 15 bp, Homo sapiens
ccttctgccatgtgc

SEQ ID NO: 44225 - DNA, 15 bp, Homo sapiens
cttctgccatgtgca

SEQ ID NO: 44226 - DNA, 15 bp, Homo sapiens
ttctgccatgtgcag

SEQ ID NO: 44227 - DNA, 15 bp, Homo sapiens
tctgccatgtgcaga

SEQ ID NO: 44228 - DNA, 15 bp, Homo sapiens
ctgccatgtgcagac

SEQ ID NO: 44229 - DNA, 15 bp, Homo sapiens
tgccatgtgcagacc

SEQ ID NO: 44230 - DNA, 15 bp, Homo sapiens
gccatgtgcagacct

SEQ ID NO: 44231 - DNA, 15 bp, Homo sapiens
ccatgtgcagacctc

SEQ ID NO: 44232 - DNA, 15 bp, Homo sapiens
catgtgcagacctct

SEQ ID NO: 44233 - DNA, 15 bp, Homo sapiens
atgtgcagacctcta

SEQ ID NO: 44234 - DNA, 15 bp, Homo sapiens
tgtgcagacctctac

SEQ ID NO: 44235 - DNA, 15 bp, Homo sapiens
gtgcagacctctaca

SEQ ID NO: 44236 - DNA, 15 bp, Homo sapiens
tgcagacctctacag

SEQ ID NO: 44237 - DNA, 15 bp, Homo sapiens
gcagacctctacaga

SEQ ID NO: 44238 - DNA, 15 bp, Homo sapiens
cagacctctacagag

SEQ ID NO: 44239 - DNA, 15 bp, Homo sapiens
agacctctacagagc

SEQ ID NO: 44240 - DNA, 15 bp, Homo sapiens
gacctctacagagca

SEQ ID NO: 44241 - DNA, 15 bp, Homo sapiens
acctctacagagcac

SEQ ID NO: 44242 - DNA, 15 bp, Homo sapiens
cctctacagagcacc

SEQ ID NO: 44243 - DNA, 15 bp, Homo sapiens
ctctacagagcacct

SEQ ID NO: 44244 - DNA, 15 bp, Homo sapiens
tctacagagcacctc

SEQ ID NO: 44245 - DNA, 15 bp, Homo sapiens
ctacagagcacctct

SEQ ID NO: 44246 - DNA, 15 bp, Homo sapiens
tacagagcacctctt

SEQ ID NO: 44247 - DNA, 15 bp, Homo sapiens
acagagcacctcttg

SEQ ID NO: 44248 - DNA, 15 bp, Homo sapiens
cagagcacctcttgc

SEQ ID NO: 44249 - DNA, 15 bp, Homo sapiens
agagcacctcttgcc

SEQ ID NO: 44250 - DNA, 15 bp, Homo sapiens
gagcacctcttgccc

SEQ ID NO: 44251 - DNA, 15 bp, Homo sapiens
agcacctcttgcccc

SEQ ID NO: 44252 - DNA, 15 bp, Homo sapiens
gcacctcttgcccca

SEQ ID NO: 44253 - DNA, 15 bp, Homo sapiens
cacctcttgccccat

SEQ ID NO: 44254 - DNA, 15 bp, Homo sapiens
acctcttgccccatc

SEQ ID NO: 44255 - DNA, 15 bp, Homo sapiens
cctcttgccccatct

SEQ ID NO: 44256 - DNA, 15 bp, Homo sapiens
ctcttgccccatcta

SEQ ID NO: 44257 - DNA, 15 bp, Homo sapiens
tcttgccccatctag

SEQ ID NO: 44258 - DNA, 15 bp, Homo sapiens
cttgccccatctagt

SEQ ID NO: 44259 - DNA, 15 bp, Homo sapiens
ttgccccatctagtc

SEQ ID NO: 44260 - DNA, 15 bp, Homo sapiens
tgccccatctagtcc

SEQ ID NO: 44261 - DNA, 15 bp, Homo sapiens
gccccatctagtccc

SEQ ID NO: 44262 - DNA, 15 bp, Homo sapiens
ccccatctagtccct

SEQ ID NO: 44263 - DNA, 15 bp, Homo sapiens
cccatctagtccctc

SEQ ID NO: 44264 - DNA, 15 bp, Homo sapiens
ccatctagtccctca

SEQ ID NO: 44265 - DNA, 15 bp, Homo sapiens
catctagtccctcac

SEQ ID NO: 44266 - DNA, 15 bp, Homo sapiens
atctagtccctcaca

SEQ ID NO: 44267 - DNA, 15 bp, Homo sapiens
tctagtccctcacac

SEQ ID NO: 44268 - DNA, 15 bp, Homo sapiens
ctagtccctcacacc

SEQ ID NO: 44269 - DNA, 15 bp, Homo sapiens
tagtccctcacaccc

SEQ ID NO: 44270 - DNA, 15 bp, Homo sapiens
agtccctcacacccc

SEQ ID NO: 44271 - DNA, 15 bp, Homo sapiens
gtccctcacaccccg

SEQ ID NO: 44272 - DNA, 15 bp, Homo sapiens
tccctcacaccccga

SEQ ID NO: 44273 - DNA, 15 bp, Homo sapiens
ccctcacaccccgag

SEQ ID NO: 44274 - DNA, 15 bp, Homo sapiens
cctcacaccccgagg

SEQ ID NO: 44275 - DNA, 15 bp, Homo sapiens
ctcacaccccgaggc

SEQ ID NO: 44276 - DNA, 15 bp, Homo sapiens
tcacaccccgaggcc

SEQ ID NO: 44277 - DNA, 15 bp, Homo sapiens
cacaccccgaggccc

SEQ ID NO: 44278 - DNA, 15 bp, Homo sapiens
acaccccgaggccct

SEQ ID NO: 44279 - DNA, 15 bp, Homo sapiens
caccccgaggccctc

SEQ ID NO: 44280 - DNA, 15 bp, Homo sapiens
accccgaggccctcc

SEQ ID NO: 44281 - DNA, 15 bp, Homo sapiens
ccccgaggccctcct

SEQ ID NO: 44282 - DNA, 15 bp, Homo sapiens
cccgaggccctcctt

SEQ ID NO: 44283 - DNA, 15 bp, Homo sapiens
ccgaggccctccttc

SEQ ID NO: 44284 - DNA, 15 bp, Homo sapiens
cgaggccctccttct

SEQ ID NO: 44285 - DNA, 15 bp, Homo sapiens
gaggccctccttctg

SEQ ID NO: 44286 - DNA, 15 bp, Homo sapiens
aggccctccttctga

SEQ ID NO: 44287 - DNA, 15 bp, Homo sapiens
ggccctccttctgac

SEQ ID NO: 44288 - DNA, 15 bp, Homo sapiens
gccctccttctgacc

SEQ ID NO: 44289 - DNA, 15 bp, Homo sapiens
ccctccttctgacct

SEQ ID NO: 44290 - DNA, 15 bp, Homo sapiens
cctccttctgaccta

SEQ ID NO: 44291 - DNA, 15 bp, Homo sapiens
ctccttctgacctag

SEQ ID NO: 44292 - DNA, 15 bp, Homo sapiens
tccttctgacctagc

SEQ ID NO: 44293 - DNA, 15 bp, Homo sapiens
ccttctgacctagcc

SEQ ID NO: 44294 - DNA, 15 bp, Homo sapiens
cttctgacctagccc

SEQ ID NO: 44295 - DNA, 15 bp, Homo sapiens
ttctgacctagccca

SEQ ID NO: 44296 - DNA, 15 bp, Homo sapiens
tctgacctagcccaa

SEQ ID NO: 44297 - DNA, 15 bp, Homo sapiens
ctgacctagcccaac

SEQ ID NO: 44298 - DNA, 15 bp, Homo sapiens
tgacctagcccaacg

SEQ ID NO: 44299 - DNA, 15 bp, Homo sapiens
gacctagcccaacgc

SEQ ID NO: 44300 - DNA, 15 bp, Homo sapiens
acctagcccaacgcg

SEQ ID NO: 44301 - DNA, 15 bp, Homo sapiens
cctagcccaacgcgc

SEQ ID NO: 44302 - DNA, 15 bp, Homo sapiens
ctagcccaacgcgca

SEQ ID NO: 44303 - DNA, 15 bp, Homo sapiens
tagcccaacgcgcag

SEQ ID NO: 44304 - DNA, 15 bp, Homo sapiens
agcccaacgcgcagc

SEQ ID NO: 44305 - DNA, 15 bp, Homo sapiens
gcccaacgcgcagcc

SEQ ID NO: 44306 - DNA, 15 bp, Homo sapiens
cccaacgcgcagccc

SEQ ID NO: 44307 - DNA, 15 bp, Homo sapiens
ccaacgcgcagcccc

SEQ ID NO: 44308 - DNA, 15 bp, Homo sapiens
caacgcgcagcccct

SEQ ID NO: 44309 - DNA, 15 bp, Homo sapiens
aacgcgcagcccctc

SEQ ID NO: 44310 - DNA, 15 bp, Homo sapiens
acgcgcagcccctcc

SEQ ID NO: 44311 - DNA, 15 bp, Homo sapiens
cgcgcagcccctcct

SEQ ID NO: 44312 - DNA, 15 bp, Homo sapiens
gcgcagcccctcctc

SEQ ID NO: 44313 - DNA, 15 bp, Homo sapiens
cgcagcccctcctcc

SEQ ID NO: 44314 - DNA, 15 bp, Homo sapiens
gcagcccctcctccg

SEQ ID NO: 44315 - DNA, 15 bp, Homo sapiens
cagcccctcctccgc

SEQ ID NO: 44316 - DNA, 15 bp, Homo sapiens
agcccctcctccgcc

SEQ ID NO: 44317 - DNA, 15 bp, Homo sapiens
gcccctcctccgccc

SEQ ID NO: 44318 - DNA, 15 bp, Homo sapiens
cccctcctccgcccc

SEQ ID NO: 44319 - DNA, 15 bp, Homo sapiens
ccctcctccgcccct

SEQ ID NO: 44320 - DNA, 15 bp, Homo sapiens
cctcctccgcccctt

SEQ ID NO: 44321 - DNA, 15 bp, Homo sapiens
ctcctccgcccctta

SEQ ID NO: 44322 - DNA, 15 bp, Homo sapiens
tcctccgccccttac

SEQ ID NO: 44323 - DNA, 15 bp, Homo sapiens
cctccgccccttacc

SEQ ID NO: 44324 - DNA, 15 bp, Homo sapiens
ctccgccccttacct

SEQ ID NO: 44325 - DNA, 15 bp, Homo sapiens
tccgccccttacctg

SEQ ID NO: 44326 - DNA, 15 bp, Homo sapiens
ccgccccttacctgc

SEQ ID NO: 44327 - DNA, 15 bp, Homo sapiens
cgccccttacctgca

SEQ ID NO: 44328 - DNA, 15 bp, Homo sapiens
gccccttacctgcac

SEQ ID NO: 44329 - DNA, 15 bp, Homo sapiens
ccccttacctgcaca

SEQ ID NO: 44330 - DNA, 15 bp, Homo sapiens
cccttacctgcacaa

SEQ ID NO: 44331 - DNA, 15 bp, Homo sapiens
ccttacctgcacaaa

SEQ ID NO: 44332 - DNA, 15 bp, Homo sapiens
cttacctgcacaaag

SEQ ID NO: 44333 - DNA, 15 bp, Homo sapiens
ttacctgcacaaagc

SEQ ID NO: 44334 - DNA, 15 bp, Homo sapiens
tacctgcacaaagct

SEQ ID NO: 44335 - DNA, 15 bp, Homo sapiens
acctgcacaaagctg

SEQ ID NO: 44336 - DNA, 15 bp, Homo sapiens
cctgcacaaagctga

SEQ ID NO: 44337 - DNA, 15 bp, Homo sapiens
ctgcacaaagctgac

SEQ ID NO: 44338 - DNA, 15 bp, Homo sapiens
tgcacaaagctgacg

SEQ ID NO: 44339 - DNA, 15 bp, Homo sapiens
gcacaaagctgacgc

SEQ ID NO: 44340 - DNA, 15 bp, Homo sapiens
cacaaagctgacgcc

SEQ ID NO: 44341 - DNA, 15 bp, Homo sapiens
acaaagctgacgccc

SEQ ID NO: 44342 - DNA, 15 bp, Homo sapiens
caaagctgacgccca

SEQ ID NO: 44343 - DNA, 15 bp, Homo sapiens
aaagctgacgcccag

SEQ ID NO: 44344 - DNA, 15 bp, Homo sapiens
aagctgacgcccagg

SEQ ID NO: 44345 - DNA, 15 bp, Homo sapiens
agctgacgcccaggg

SEQ ID NO: 44346 - DNA, 15 bp, Homo sapiens
gctgacgcccagggt

SEQ ID NO: 44347 - DNA, 15 bp, Homo sapiens
ctgacgcccagggtc

SEQ ID NO: 44348 - DNA, 15 bp, Homo sapiens
tgacgcccagggtct

SEQ ID NO: 44349 - DNA, 15 bp, Homo sapiens
gacgcccagggtctt

SEQ ID NO: 44350 - DNA, 15 bp, Homo sapiens
acgcccagggtcttc

SEQ ID NO: 44351 - DNA, 15 bp, Homo sapiens
cgcccagggtcttca

SEQ ID NO: 44352 - DNA, 15 bp, Homo sapiens
gcccagggtcttcat

SEQ ID NO: 44353 - DNA, 15 bp, Homo sapiens
cccagggtcttcatg

SEQ ID NO: 44354 - DNA, 15 bp, Homo sapiens
ccagggtcttcatgt

SEQ ID NO: 44355 - DNA, 15 bp, Homo sapiens
cagggtcttcatgtc

SEQ ID NO: 44356 - DNA, 15 bp, Homo sapiens
agggtcttcatgtcg

SEQ ID NO: 44357 - DNA, 15 bp, Homo sapiens
gggtcttcatgtcgg

SEQ ID NO: 44358 - DNA, 15 bp, Homo sapiens
ggtcttcatgtcggc

SEQ ID NO: 44359 - DNA, 15 bp, Homo sapiens
gtcttcatgtcggcc

SEQ ID NO: 44360 - DNA, 15 bp, Homo sapiens
tcttcatgtcggcct

SEQ ID NO: 44361 - DNA, 15 bp, Homo sapiens
cttcatgtcggcctc

SEQ ID NO: 44362 - DNA, 15 bp, Homo sapiens
ttcatgtcggcctca

SEQ ID NO: 44363 - DNA, 15 bp, Homo sapiens
tcatgtcggcctcaa

SEQ ID NO: 44364 - DNA, 15 bp, Homo sapiens
catgtcggcctcaac

SEQ ID NO: 44365 - DNA, 15 bp, Homo sapiens
atgtcggcctcaacc

SEQ ID NO: 44366 - DNA, 15 bp, Homo sapiens
tgtcggcctcaacct

SEQ ID NO: 44367 - DNA, 15 bp, Homo sapiens
gtcggcctcaacctc

SEQ ID NO: 44368 - DNA, 15 bp, Homo sapiens
tcggcctcaacctcc

SEQ ID NO: 44369 - DNA, 15 bp, Homo sapiens
cggcctcaacctcct

SEQ ID NO: 44370 - DNA, 15 bp, Homo sapiens
ggcctcaacctcctc

SEQ ID NO: 44371 - DNA, 15 bp, Homo sapiens
gcctcaacctcctca

SEQ ID NO: 44372 - DNA, 15 bp, Homo sapiens
cctcaacctcctcaa

SEQ ID NO: 44373 - DNA, 15 bp, Homo sapiens
ctcaacctcctcaat

SEQ ID NO: 44374 - DNA, 15 bp, Homo sapiens
tcaacctcctcaatg

SEQ ID NO: 44375 - DNA, 15 bp, Homo sapiens
caacctcctcaatgc

SEQ ID NO: 44376 - DNA, 15 bp, Homo sapiens
aacctcctcaatgct

SEQ ID NO: 44377 - DNA, 15 bp, Homo sapiens
acctcctcaatgctg

SEQ ID NO: 44378 - DNA, 15 bp, Homo sapiens
cctcctcaatgctgc

SEQ ID NO: 44379 - DNA, 15 bp, Homo sapiens
ctcctcaatgctgcg

SEQ ID NO: 44380 - DNA, 15 bp, Homo sapiens
tcctcaatgctgcgg

SEQ ID NO: 44381 - DNA, 15 bp, Homo sapiens
cctcaatgctgcggt

SEQ ID NO: 44382 - DNA, 15 bp, Homo sapiens
ctcaatgctgcggtt

SEQ ID NO: 44383 - DNA, 15 bp, Homo sapiens
tcaatgctgcggttc

SEQ ID NO: 44384 - DNA, 15 bp, Homo sapiens
caatgctgcggttca

SEQ ID NO: 44385 - DNA, 15 bp, Homo sapiens
aatgctgcggttcac

SEQ ID NO: 44386 - DNA, 15 bp, Homo sapiens
atgctgcggttcact

SEQ ID NO: 44387 - DNA, 15 bp, Homo sapiens
tgctgcggttcactc

SEQ ID NO: 44388 - DNA, 15 bp, Homo sapiens
gctgcggttcactcc

SEQ ID NO: 44389 - DNA, 15 bp, Homo sapiens
ctgcggttcactcct

SEQ ID NO: 44390 - DNA, 15 bp, Homo sapiens
tgcggttcactcctt

SEQ ID NO: 44391 - DNA, 15 bp, Homo sapiens
gcggttcactccttc

SEQ ID NO: 44392 - DNA, 15 bp, Homo sapiens
cggttcactccttcc

SEQ ID NO: 44393 - DNA, 15 bp, Homo sapiens
ggttcactccttcca

SEQ ID NO: 44394 - DNA, 15 bp, Homo sapiens
gttcactccttccag

SEQ ID NO: 44395 - DNA, 15 bp, Homo sapiens
ttcactccttccagc

SEQ ID NO: 44396 - DNA, 15 bp, Homo sapiens
tcactccttccagct

SEQ ID NO: 44397 - DNA, 15 bp, Homo sapiens
cactccttccagctg

SEQ ID NO: 44398 - DNA, 15 bp, Homo sapiens
actccttccagctgc

SEQ ID NO: 44399 - DNA, 15 bp, Homo sapiens
ctccttccagctgct

SEQ ID NO: 44400 - DNA, 15 bp, Homo sapiens
ccttccagctgctcc

SEQ ID NO: 44401 - DNA, 15 bp, Homo sapiens
cttccagctgctccc

SEQ ID NO: 44402 - DNA, 15 bp, Homo sapiens
ttccagctgctcccg

SEQ ID NO: 44403 - DNA, 15 bp, Homo sapiens
tccagctgctcccga

SEQ ID NO: 44404 - DNA, 15 bp, Homo sapiens
ccagctgctcccgaa

SEQ ID NO: 44405 - DNA, 15 bp, Homo sapiens
cagctgctcccgaag

SEQ ID NO: 44406 - DNA, 15 bp, Homo sapiens
agctgctcccgaagg

SEQ ID NO: 44407 - DNA, 15 bp, Homo sapiens
gctgctcccgaaggg

SEQ ID NO: 44408 - DNA, 15 bp, Homo sapiens
ctgctcccgaaggga

SEQ ID NO: 44409 - DNA, 15 bp, Homo sapiens
tgctcccgaagggac

SEQ ID NO: 44410 - DNA, 15 bp, Homo sapiens
gctcccgaagggact

SEQ ID NO: 44411 - DNA, 15 bp, Homo sapiens
ctcccgaagggactc

SEQ ID NO: 44412 - DNA, 15 bp, Homo sapiens
tcccgaagggactcg

SEQ ID NO: 44413 - DNA, 15 bp, Homo sapiens
cccgaagggactcga

SEQ ID NO: 44414 - DNA, 15 bp, Homo sapiens
ccgaagggactcgag

SEQ ID NO: 44415 - DNA, 15 bp, Homo sapiens
cgaagggactcgagc

SEQ ID NO: 44416 - DNA, 15 bp, Homo sapiens
gaagggactcgagct

SEQ ID NO: 44417 - DNA, 15 bp, Homo sapiens
aagggactcgagctc

SEQ ID NO: 44418 - DNA, 15 bp, Homo sapiens
agggactcgagctcc

SEQ ID NO: 44419 - DNA, 15 bp, Homo sapiens
gggactcgagctcct

SEQ ID NO: 44420 - DNA, 15 bp, Homo sapiens
ggactcgagctcctg

SEQ ID NO: 44421 - DNA, 15 bp, Homo sapiens
gactcgagctcctgt

SEQ ID NO: 44422 - DNA, 15 bp, Homo sapiens
actcgagctcctgtt

SEQ ID NO: 44423 - DNA, 15 bp, Homo sapiens
ctcgagctcctgttc

SEQ ID NO: 44424 - DNA, 15 bp, Homo sapiens
tcgagctcctgttcc

SEQ ID NO: 44425 - DNA, 15 bp, Homo sapiens
cgagctcctgttcct

SEQ ID NO: 44426 - DNA, 15 bp, Homo sapiens
gagctcctgttcctg

SEQ ID NO: 44427 - DNA, 15 bp, Homo sapiens
agctcctgttcctga

SEQ ID NO: 44428 - DNA, 15 bp, Homo sapiens
gctcctgttcctgag

SEQ ID NO: 44429 - DNA, 15 bp, Homo sapiens
ctcctgttcctgagc

SEQ ID NO: 44430 - DNA, 15 bp, Homo sapiens
tcctgttcctgagct

SEQ ID NO: 44431 - DNA, 15 bp, Homo sapiens
cctgttcctgagctg

SEQ ID NO: 44432 - DNA, 15 bp, Homo sapiens
ctgttcctgagctgc

SEQ ID NO: 44433 - DNA, 15 bp, Homo sapiens
tgttcctgagctgcc

SEQ ID NO: 44434 - DNA, 15 bp, Homo sapiens
gttcctgagctgccc

SEQ ID NO: 44435 - DNA, 15 bp, Homo sapiens
ttcctgagctgccca

SEQ ID NO: 44436 - DNA, 15 bp, Homo sapiens
tcctgagctgcccac

SEQ ID NO: 44437 - DNA, 15 bp, Homo sapiens
cctgagctgcccacg

SEQ ID NO: 44438 - DNA, 15 bp, Homo sapiens
ctgagctgcccacgt

SEQ ID NO: 44439 - DNA, 15 bp, Homo sapiens
tgagctgcccacgtg

SEQ ID NO: 44440 - DNA, 15 bp, Homo sapiens
gagctgcccacgtga

SEQ ID NO: 44441 - DNA, 15 bp, Homo sapiens
agctgcccacgtgac

SEQ ID NO: 44442 - DNA, 15 bp, Homo sapiens
gctgcccacgtgacc

SEQ ID NO: 44443 - DNA, 15 bp, Homo sapiens
ctgcccacgtgacct

SEQ ID NO: 44444 - DNA, 15 bp, Homo sapiens
tgcccacgtgacctg

SEQ ID NO: 44445 - DNA, 15 bp, Homo sapiens
gcccacgtgacctgg

SEQ ID NO: 44446 - DNA, 15 bp, Homo sapiens
cccacgtgacctggg

SEQ ID NO: 44447 - DNA, 15 bp, Homo sapiens
ccacgtgacctggga

SEQ ID NO: 44448 - DNA, 15 bp, Homo sapiens
cacgtgacctgggag

SEQ ID NO: 44449 - DNA, 15 bp, Homo sapiens
acgtgacctgggagg

SEQ ID NO: 44450 - DNA, 15 bp, Homo sapiens
cgtgacctgggaggc

SEQ ID NO: 44451 - DNA, 15 bp, Homo sapiens
gtgacctgggaggcc

SEQ ID NO: 44452 - DNA, 15 bp, Homo sapiens
tgacctgggaggccc

SEQ ID NO: 44453 - DNA, 15 bp, Homo sapiens
gacctgggaggccca

SEQ ID NO: 44454 - DNA, 15 bp, Homo sapiens
acctgggaggcccag

SEQ ID NO: 44455 - DNA, 15 bp, Homo sapiens
cctgggaggcccagg

SEQ ID NO: 44456 - DNA, 15 bp, Homo sapiens
ctgggaggcccaggc

SEQ ID NO: 44457 - DNA, 15 bp, Homo sapiens
tgggaggcccaggcc

SEQ ID NO: 44458 - DNA, 15 bp, Homo sapiens
gggaggcccaggcca

SEQ ID NO: 44459 - DNA, 15 bp, Homo sapiens
ggaggcccaggccag

SEQ ID NO: 44460 - DNA, 15 bp, Homo sapiens
gaggcccaggccagt

SEQ ID NO: 44461 - DNA, 15 bp, Homo sapiens
aggcccaggccagtc

SEQ ID NO: 44462 - DNA, 15 bp, Homo sapiens
ggcccaggccagtca

SEQ ID NO: 44463 - DNA, 15 bp, Homo sapiens
gcccaggccagtcag

SEQ ID NO: 44464 - DNA, 15 bp, Homo sapiens
cccaggccagtcagg

SEQ ID NO: 44465 - DNA, 15 bp, Homo sapiens
ccaggccagtcaggg

SEQ ID NO: 44466 - DNA, 15 bp, Homo sapiens
caggccagtcagggt

SEQ ID NO: 44467 - DNA, 15 bp, Homo sapiens
aggccagtcagggtt

SEQ ID NO: 44468 - DNA, 15 bp, Homo sapiens
ggccagtcagggttg

SEQ ID NO: 44469 - DNA, 15 bp, Homo sapiens
gccagtcagggttgg

SEQ ID NO: 44470 - DNA, 15 bp, Homo sapiens
ccagtcagggttggg

SEQ ID NO: 44471 - DNA, 15 bp, Homo sapiens
cagtcagggttgggg

SEQ ID NO: 44472 - DNA, 15 bp, Homo sapiens
agtcagggttggggt

SEQ ID NO: 44473 - DNA, 15 bp, Homo sapiens
gtcagggttggggtg

SEQ ID NO: 44474 - DNA, 15 bp, Homo sapiens
tcagggttggggtgt

SEQ ID NO: 44475 - DNA, 15 bp, Homo sapiens
cagggttggggtgtc

SEQ ID NO: 44476 - DNA, 15 bp, Homo sapiens
agggttggggtgtca

SEQ ID NO: 44477 - DNA, 15 bp, Homo sapiens
gggttggggtgtcag

SEQ ID NO: 44478 - DNA, 15 bp, Homo sapiens
ggttggggtgtcagg

SEQ ID NO: 44479 - DNA, 15 bp, Homo sapiens
gttggggtgtcaggc

SEQ ID NO: 44480 - DNA, 15 bp, Homo sapiens
ttggggtgtcaggcc

SEQ ID NO: 44481 - DNA, 15 bp, Homo sapiens
tggggtgtcaggccc

SEQ ID NO: 44482 - DNA, 15 bp, Homo sapiens
ggggtgtcaggccca

SEQ ID NO: 44483 - DNA, 15 bp, Homo sapiens
gggtgtcaggcccag

SEQ ID NO: 44484 - DNA, 15 bp, Homo sapiens
ggtgtcaggcccagt

SEQ ID NO: 44485 - DNA, 15 bp, Homo sapiens
gtgtcaggcccagta

SEQ ID NO: 44486 - DNA, 15 bp, Homo sapiens
tgtcaggcccagtag

SEQ ID NO: 44487 - DNA, 15 bp, Homo sapiens
gtcaggcccagtaga

SEQ ID NO: 44488 - DNA, 15 bp, Homo sapiens
tcaggcccagtagac

SEQ ID NO: 44489 - DNA, 15 bp, Homo sapiens
caggcccagtagaca

SEQ ID NO: 44490 - DNA, 15 bp, Homo sapiens
aggcccagtagacaa

SEQ ID NO: 44491 - DNA, 15 bp, Homo sapiens
ggcccagtagacaag

SEQ ID NO: 44492 - DNA, 15 bp, Homo sapiens
gcccagtagacaagc

SEQ ID NO: 44493 - DNA, 15 bp, Homo sapiens
cccagtagacaagca

SEQ ID NO: 44494 - DNA, 15 bp, Homo sapiens
ccagtagacaagcaa

SEQ ID NO: 44495 - DNA, 15 bp, Homo sapiens
cagtagacaagcaag

SEQ ID NO: 44496 - DNA, 15 bp, Homo sapiens
agtagacaagcaagg

SEQ ID NO: 44497 - DNA, 15 bp, Homo sapiens
gtagacaagcaaggg

SEQ ID NO: 44498 - DNA, 15 bp, Homo sapiens
tagacaagcaagggc

SEQ ID NO: 44499 - DNA, 15 bp, Homo sapiens
agacaagcaagggcc

SEQ ID NO: 44500 - DNA, 15 bp, Homo sapiens
gacaagcaagggcct

SEQ ID NO: 44501 - DNA, 15 bp, Homo sapiens
acaagcaagggcctg

SEQ ID NO: 44502 - DNA, 15 bp, Homo sapiens
caagcaagggcctgg

SEQ ID NO: 44503 - DNA, 15 bp, Homo sapiens
aagcaagggcctggg

SEQ ID NO: 44504 - DNA, 15 bp, Homo sapiens
agcaagggcctggga

SEQ ID NO: 44505 - DNA, 15 bp, Homo sapiens
gcaagggcctgggac

SEQ ID NO: 44506 - DNA, 15 bp, Homo sapiens
caagggcctgggaca

SEQ ID NO: 44507 - DNA, 15 bp, Homo sapiens
aagggcctgggacac

SEQ ID NO: 44508 - DNA, 15 bp, Homo sapiens
agggcctgggacacc

SEQ ID NO: 44509 - DNA, 15 bp, Homo sapiens
gggcctgggacaccc

SEQ ID NO: 44510 - DNA, 15 bp, Homo sapiens
ggcctgggacacccc

SEQ ID NO: 44511 - DNA, 15 bp, Homo sapiens
gcctgggacaccccc

SEQ ID NO: 44512 - DNA, 15 bp, Homo sapiens
cctgggacacccccc

SEQ ID NO: 44513 - DNA, 15 bp, Homo sapiens
ctgggacacccccct

SEQ ID NO: 44514 - DNA, 15 bp, Homo sapiens
tgggacacccccctc

SEQ ID NO: 44515 - DNA, 15 bp, Homo sapiens
gggacacccccctcc

SEQ ID NO: 44516 - DNA, 15 bp, Homo sapiens
ggacacccccctcca

SEQ ID NO: 44517 - DNA, 15 bp, Homo sapiens
gacacccccctccaa

SEQ ID NO: 44518 - DNA, 15 bp, Homo sapiens
acacccccctccaaa

SEQ ID NO: 44519 - DNA, 15 bp, Homo sapiens
cacccccctccaaac

SEQ ID NO: 44520 - DNA, 15 bp, Homo sapiens
acccccctccaaacc

SEQ ID NO: 44521 - DNA, 15 bp, Homo sapiens
cccccctccaaacca

SEQ ID NO: 44522 - DNA, 15 bp, Homo sapiens
ccccctccaaaccac

SEQ ID NO: 44523 - DNA, 15 bp, Homo sapiens
cccctccaaaccact

SEQ ID NO: 44524 - DNA, 15 bp, Homo sapiens
ccctccaaaccactc

SEQ ID NO: 44525 - DNA, 15 bp, Homo sapiens
cctccaaaccactct

SEQ ID NO: 44526 - DNA, 15 bp, Homo sapiens
ctccaaaccactctg

SEQ ID NO: 44527 - DNA, 15 bp, Homo sapiens
tccaaaccactctgc

SEQ ID NO: 44528 - DNA, 15 bp, Homo sapiens
ccaaaccactctgct

SEQ ID NO: 44529 - DNA, 15 bp, Homo sapiens
caaaccactctgctc

SEQ ID NO: 44530 - DNA, 15 bp, Homo sapiens
aaaccactctgctca

SEQ ID NO: 44531 - DNA, 15 bp, Homo sapiens
aaccactctgctcac

SEQ ID NO: 44532 - DNA, 15 bp, Homo sapiens
accactctgctcacc

SEQ ID NO: 44533 - DNA, 15 bp, Homo sapiens
ccactctgctcacct

SEQ ID NO: 44534 - DNA, 15 bp, Homo sapiens
cactctgctcacctg

SEQ ID NO: 44535 - DNA, 15 bp, Homo sapiens
actctgctcacctgt

SEQ ID NO: 44536 - DNA, 15 bp, Homo sapiens
ctctgctcacctgtt

SEQ ID NO: 44537 - DNA, 15 bp, Homo sapiens
tctgctcacctgttc

SEQ ID NO: 44538 - DNA, 15 bp, Homo sapiens
ctgctcacctgttca

SEQ ID NO: 44539 - DNA, 15 bp, Homo sapiens
tgctcacctgttcag

SEQ ID NO: 44540 - DNA, 15 bp, Homo sapiens
gctcacctgttcagg

SEQ ID NO: 44541 - DNA, 15 bp, Homo sapiens
ctcacctgttcaggc

SEQ ID NO: 44542 - DNA, 15 bp, Homo sapiens
tcacctgttcaggcc

SEQ ID NO: 44543 - DNA, 15 bp, Homo sapiens
cacctgttcaggccg

SEQ ID NO: 44544 - DNA, 15 bp, Homo sapiens
acctgttcaggccgc

SEQ ID NO: 44545 - DNA, 15 bp, Homo sapiens
cctgttcaggccgcc

SEQ ID NO: 44546 - DNA, 15 bp, Homo sapiens
ctgttcaggccgccg

SEQ ID NO: 44547 - DNA, 15 bp, Homo sapiens
tgttcaggccgccgg

SEQ ID NO: 44548 - DNA, 15 bp, Homo sapiens
gttcaggccgccggg

SEQ ID NO: 44549 - DNA, 15 bp, Homo sapiens
ttcaggccgccggga

SEQ ID NO: 44550 - DNA, 15 bp, Homo sapiens
tcaggccgccgggag

SEQ ID NO: 44551 - DNA, 15 bp, Homo sapiens
caggccgccgggagg

SEQ ID NO: 44552 - DNA, 15 bp, Homo sapiens
aggccgccgggaggt

SEQ ID NO: 44553 - DNA, 15 bp, Homo sapiens
ggccgccgggaggtg

SEQ ID NO: 44554 - DNA, 15 bp, Homo sapiens
gccgccgggaggtgg

SEQ ID NO: 44555 - DNA, 15 bp, Homo sapiens
ccgccgggaggtggc

SEQ ID NO: 44556 - DNA, 15 bp, Homo sapiens
cgccgggaggtggct

SEQ ID NO: 44557 - DNA, 15 bp, Homo sapiens
gccgggaggtggctg

SEQ ID NO: 44558 - DNA, 15 bp, Homo sapiens
ccgggaggtggctgg

SEQ ID NO: 44559 - DNA, 15 bp, Homo sapiens
cgggaggtggctggc

SEQ ID NO: 44560 - DNA, 15 bp, Homo sapiens
gggaggtggctggca

SEQ ID NO: 44561 - DNA, 15 bp, Homo sapiens
ggaggtggctggcac

SEQ ID NO: 44562 - DNA, 15 bp, Homo sapiens
gaggtggctggcaca

SEQ ID NO: 44563 - DNA, 15 bp, Homo sapiens
aggtggctggcacat

SEQ ID NO: 44564 - DNA, 15 bp, Homo sapiens
ggtggctggcacatc

SEQ ID NO: 44565 - DNA, 15 bp, Homo sapiens
gtggctggcacatct

SEQ ID NO: 44566 - DNA, 15 bp, Homo sapiens
tggctggcacatctg

SEQ ID NO: 44567 - DNA, 15 bp, Homo sapiens
ggctggcacatctga

SEQ ID NO: 44568 - DNA, 15 bp, Homo sapiens
gctggcacatctgac

SEQ ID NO: 44569 - DNA, 15 bp, Homo sapiens
ctggcacatctgaca

SEQ ID NO: 44570 - DNA, 15 bp, Homo sapiens
tggcacatctgacac

SEQ ID NO: 44571 - DNA, 15 bp, Homo sapiens
ggcacatctgacacc

SEQ ID NO: 44572 - DNA, 15 bp, Homo sapiens
gcacatctgacacct

SEQ ID NO: 44573 - DNA, 15 bp, Homo sapiens
cacatctgacacctg

SEQ ID NO: 44574 - DNA, 15 bp, Homo sapiens
acatctgacacctga

SEQ ID NO: 44575 - DNA, 15 bp, Homo sapiens
catctgacacctgag

SEQ ID NO: 44576 - DNA, 15 bp, Homo sapiens
atctgacacctgagt

SEQ ID NO: 44577 - DNA, 15 bp, Homo sapiens
tctgacacctgagtg

SEQ ID NO: 44578 - DNA, 15 bp, Homo sapiens
ctgacacctgagtgg

SEQ ID NO: 44579 - DNA, 15 bp, Homo sapiens
tgacacctgagtggc

SEQ ID NO: 44580 - DNA, 15 bp, Homo sapiens
gacacctgagtggcc

SEQ ID NO: 44581 - DNA, 15 bp, Homo sapiens
acacctgagtggcct

SEQ ID NO: 44582 - DNA, 15 bp, Homo sapiens
cacctgagtggcctg

SEQ ID NO: 44583 - DNA, 15 bp, Homo sapiens
acctgagtggcctgg

SEQ ID NO: 44584 - DNA, 15 bp, Homo sapiens
cctgagtggcctggg

SEQ ID NO: 44585 - DNA, 15 bp, Homo sapiens
ctgagtggcctgggc

SEQ ID NO: 44586 - DNA, 15 bp, Homo sapiens
tgagtggcctgggcc

SEQ ID NO: 44587 - DNA, 15 bp, Homo sapiens
gagtggcctgggcct

SEQ ID NO: 44588 - DNA, 15 bp, Homo sapiens
agtggcctgggcctg

SEQ ID NO: 44589 - DNA, 15 bp, Homo sapiens
gtggcctgggcctgg

SEQ ID NO: 44590 - DNA, 15 bp, Homo sapiens
tggcctgggcctggg

SEQ ID NO: 44591 - DNA, 15 bp, Homo sapiens
ggcctgggcctgggg

SEQ ID NO: 44592 - DNA, 15 bp, Homo sapiens
gcctgggcctggggc

SEQ ID NO: 44593 - DNA, 15 bp, Homo sapiens
cctgggcctggggct

SEQ ID NO: 44594 - DNA, 15 bp, Homo sapiens
ctgggcctggggctc

SEQ ID NO: 44595 - DNA, 15 bp, Homo sapiens
tgggcctggggctcc

SEQ ID NO: 44596 - DNA, 15 bp, Homo sapiens
gggcctggggctcct

SEQ ID NO: 44597 - DNA, 15 bp, Homo sapiens
ggcctggggctccta

SEQ ID NO: 44598 - DNA, 15 bp, Homo sapiens
gcctggggctcctaa

SEQ ID NO: 44599 - DNA, 15 bp, Homo sapiens
cctggggctcctaag

SEQ ID NO: 44600 - DNA, 15 bp, Homo sapiens
ctggggctcctaagg

SEQ ID NO: 44601 - DNA, 15 bp, Homo sapiens
tggggctcctaaggg

SEQ ID NO: 44602 - DNA, 15 bp, Homo sapiens
ggggctcctaagggg

SEQ ID NO: 44603 - DNA, 15 bp, Homo sapiens
gggctcctaagggga

SEQ ID NO: 44604 - DNA, 15 bp, Homo sapiens
ggctcctaaggggag

SEQ ID NO: 44605 - DNA, 15 bp, Homo sapiens
gctcctaaggggagt

SEQ ID NO: 44606 - DNA, 15 bp, Homo sapiens
ctcctaaggggagtg

SEQ ID NO: 44607 - DNA, 15 bp, Homo sapiens
tcctaaggggagtga

SEQ ID NO: 44608 - DNA, 15 bp, Homo sapiens
cctaaggggagtgac

SEQ ID NO: 44609 - DNA, 15 bp, Homo sapiens
ctaaggggagtgacg

SEQ ID NO: 44610 - DNA, 15 bp, Homo sapiens
taaggggagtgacga

SEQ ID NO: 44611 - DNA, 15 bp, Homo sapiens
aaggggagtgacgag

SEQ ID NO: 44612 - DNA, 15 bp, Homo sapiens
aggggagtgacgagg

SEQ ID NO: 44613 - DNA, 15 bp, Homo sapiens
ggggagtgacgaggg

SEQ ID NO: 44614 - DNA, 15 bp, Homo sapiens
gggagtgacgagggg

SEQ ID NO: 44615 - DNA, 15 bp, Homo sapiens
ggagtgacgaggggc

SEQ ID NO: 44616 - DNA, 15 bp, Homo sapiens
gagtgacgaggggca

SEQ ID NO: 44617 - DNA, 15 bp, Homo sapiens
agtgacgaggggcat

SEQ ID NO: 44618 - DNA, 15 bp, Homo sapiens
gtgacgaggggcatc

SEQ ID NO: 44619 - DNA, 15 bp, Homo sapiens
tgacgaggggcatcc

SEQ ID NO: 44620 - DNA, 15 bp, Homo sapiens
gacgaggggcatcct

SEQ ID NO: 44621 - DNA, 15 bp, Homo sapiens
acgaggggcatcctg

SEQ ID NO: 44622 - DNA, 15 bp, Homo sapiens
cgaggggcatcctgg

SEQ ID NO: 44623 - DNA, 15 bp, Homo sapiens
gaggggcatcctggc

SEQ ID NO: 44624 - DNA, 15 bp, Homo sapiens
aggggcatcctggct

SEQ ID NO: 44625 - DNA, 15 bp, Homo sapiens
ggggcatcctggctg

SEQ ID NO: 44626 - DNA, 15 bp, Homo sapiens
gggcatcctggctgc

SEQ ID NO: 44627 - DNA, 15 bp, Homo sapiens
ggcatcctggctgcc

SEQ ID NO: 44628 - DNA, 15 bp, Homo sapiens
gcatcctggctgcca

SEQ ID NO: 44629 - DNA, 15 bp, Homo sapiens
catcctggctgccag

SEQ ID NO: 44630 - DNA, 15 bp, Homo sapiens
atcctggctgccagg

SEQ ID NO: 44631 - DNA, 15 bp, Homo sapiens
tcctggctgccaggg

SEQ ID NO: 44632 - DNA, 15 bp, Homo sapiens
cctggctgccaggga

SEQ ID NO: 44633 - DNA, 15 bp, Homo sapiens
ctggctgccagggaa

SEQ ID NO: 44634 - DNA, 15 bp, Homo sapiens
tggctgccagggaag

SEQ ID NO: 44635 - DNA, 15 bp, Homo sapiens
ggctgccagggaagg

SEQ ID NO: 44636 - DNA, 15 bp, Homo sapiens
gctgccagggaaggc

SEQ ID NO: 44637 - DNA, 15 bp, Homo sapiens
ctgccagggaaggcc

SEQ ID NO: 44638 - DNA, 15 bp, Homo sapiens
tgccagggaaggccc

SEQ ID NO: 44639 - DNA, 15 bp, Homo sapiens
gccagggaaggccct

SEQ ID NO: 44640 - DNA, 15 bp, Homo sapiens
ccagggaaggccctt

SEQ ID NO: 44641 - DNA, 15 bp, Homo sapiens
cagggaaggcccttc

SEQ ID NO: 44642 - DNA, 15 bp, Homo sapiens
agggaaggcccttcc

SEQ ID NO: 44643 - DNA, 15 bp, Homo sapiens
gggaaggcccttcct

SEQ ID NO: 44644 - DNA, 15 bp, Homo sapiens
ggaaggcccttcctc

SEQ ID NO: 44645 - DNA, 15 bp, Homo sapiens
gaaggcccttcctca

SEQ ID NO: 44646 - DNA, 15 bp, Homo sapiens
aaggcccttcctcac

SEQ ID NO: 44647 - DNA, 15 bp, Homo sapiens
aggcccttcctcacg

SEQ ID NO: 44648 - DNA, 15 bp, Homo sapiens
ggcccttcctcacgt

SEQ ID NO: 44649 - DNA, 15 bp, Homo sapiens
gcccttcctcacgtg

SEQ ID NO: 44650 - DNA, 15 bp, Homo sapiens
cccttcctcacgtgg

SEQ ID NO: 44651 - DNA, 15 bp, Homo sapiens
ccttcctcacgtggc

SEQ ID NO: 44652 - DNA, 15 bp, Homo sapiens
cttcctcacgtggcc

SEQ ID NO: 44653 - DNA, 15 bp, Homo sapiens
ttcctcacgtggccc

SEQ ID NO: 44654 - DNA, 15 bp, Homo sapiens
tcctcacgtggccca

SEQ ID NO: 44655 - DNA, 15 bp, Homo sapiens
cctcacgtggcccag

SEQ ID NO: 44656 - DNA, 15 bp, Homo sapiens
ctcacgtggcccagc

SEQ ID NO: 44657 - DNA, 15 bp, Homo sapiens
tcacgtggcccagcc

SEQ ID NO: 44658 - DNA, 15 bp, Homo sapiens
cacgtggcccagcct

SEQ ID NO: 44659 - DNA, 15 bp, Homo sapiens
acgtggcccagcctc

SEQ ID NO: 44660 - DNA, 15 bp, Homo sapiens
cgtggcccagcctca

SEQ ID NO: 44661 - DNA, 15 bp, Homo sapiens
gtggcccagcctcag

SEQ ID NO: 44662 - DNA, 15 bp, Homo sapiens
tggcccagcctcagc

SEQ ID NO: 44663 - DNA, 15 bp, Homo sapiens
ggcccagcctcagcc

SEQ ID NO: 44664 - DNA, 15 bp, Homo sapiens
gcccagcctcagcct

SEQ ID NO: 44665 - DNA, 15 bp, Homo sapiens
cccagcctcagcctc

SEQ ID NO: 44666 - DNA, 15 bp, Homo sapiens
ccagcctcagcctcc

SEQ ID NO: 44667 - DNA, 15 bp, Homo sapiens
cagcctcagcctccc

SEQ ID NO: 44668 - DNA, 15 bp, Homo sapiens
agcctcagcctcccc

SEQ ID NO: 44669 - DNA, 15 bp, Homo sapiens
gcctcagcctcccct

SEQ ID NO: 44670 - DNA, 15 bp, Homo sapiens
cctcagcctcccctg

SEQ ID NO: 44671 - DNA, 15 bp, Homo sapiens
ctcagcctcccctga

SEQ ID NO: 44672 - DNA, 15 bp, Homo sapiens
tcagcctcccctgag

SEQ ID NO: 44673 - DNA, 15 bp, Homo sapiens
cagcctcccctgaga

SEQ ID NO: 44674 - DNA, 15 bp, Homo sapiens
agcctcccctgagaa

SEQ ID NO: 44675 - DNA, 15 bp, Homo sapiens
gcctcccctgagaac

SEQ ID NO: 44676 - DNA, 15 bp, Homo sapiens
cctcccctgagaact

SEQ ID NO: 44677 - DNA, 15 bp, Homo sapiens
ctcccctgagaactg

SEQ ID NO: 44678 - DNA, 15 bp, Homo sapiens
tcccctgagaactgc

SEQ ID NO: 44679 - DNA, 15 bp, Homo sapiens
cccctgagaactgcc

SEQ ID NO: 44680 - DNA, 15 bp, Homo sapiens
ccctgagaactgccc

SEQ ID NO: 44681 - DNA, 15 bp, Homo sapiens
cctgagaactgcccc

SEQ ID NO: 44682 - DNA, 15 bp, Homo sapiens
ctgagaactgccccc

SEQ ID NO: 44683 - DNA, 15 bp, Homo sapiens
tgagaactgccccca

SEQ ID NO: 44684 - DNA, 15 bp, Homo sapiens
gagaactgcccccag

SEQ ID NO: 44685 - DNA, 15 bp, Homo sapiens
agaactgcccccagt

SEQ ID NO: 44686 - DNA, 15 bp, Homo sapiens
gaactgcccccagtg

SEQ ID NO: 44687 - DNA, 15 bp, Homo sapiens
aactgcccccagtgc

SEQ ID NO: 44688 - DNA, 15 bp, Homo sapiens
actgcccccagtgcg

SEQ ID NO: 44689 - DNA, 15 bp, Homo sapiens
ctgcccccagtgcgg

SEQ ID NO: 44690 - DNA, 15 bp, Homo sapiens
tgcccccagtgcggc

SEQ ID NO: 44691 - DNA, 15 bp, Homo sapiens
gcccccagtgcggca

SEQ ID NO: 44692 - DNA, 15 bp, Homo sapiens
cccccagtgcggcat

SEQ ID NO: 44693 - DNA, 15 bp, Homo sapiens
ccccagtgcggcatg

SEQ ID NO: 44694 - DNA, 15 bp, Homo sapiens
cccagtgcggcatgc

SEQ ID NO: 44695 - DNA, 15 bp, Homo sapiens
ccagtgcggcatgca

SEQ ID NO: 44696 - DNA, 15 bp, Homo sapiens
cagtgcggcatgcat

SEQ ID NO: 44697 - DNA, 15 bp, Homo sapiens
agtgcggcatgcatg

SEQ ID NO: 44698 - DNA, 15 bp, Homo sapiens
gtgcggcatgcatgc

SEQ ID NO: 44699 - DNA, 15 bp, Homo sapiens
tgcggcatgcatgcc

SEQ ID NO: 44700 - DNA, 15 bp, Homo sapiens
gcggcatgcatgccc

SEQ ID NO: 44701 - DNA, 15 bp, Homo sapiens
cggcatgcatgccca

SEQ ID NO: 44702 - DNA, 15 bp, Homo sapiens
ggcatgcatgcccac

SEQ ID NO: 44703 - DNA, 15 bp, Homo sapiens
gcatgcatgcccact

SEQ ID NO: 44704 - DNA, 15 bp, Homo sapiens
catgcatgcccactg

SEQ ID NO: 44705 - DNA, 15 bp, Homo sapiens
atgcatgcccactga

SEQ ID NO: 44706 - DNA, 15 bp, Homo sapiens
tgcatgcccactgaa

SEQ ID NO: 44707 - DNA, 15 bp, Homo sapiens
gcatgcccactgaag

SEQ ID NO: 44708 - DNA, 15 bp, Homo sapiens
catgcccactgaagc

SEQ ID NO: 44709 - DNA, 15 bp, Homo sapiens
atgcccactgaagca

SEQ ID NO: 44710 - DNA, 15 bp, Homo sapiens
tgcccactgaagcac

SEQ ID NO: 44711 - DNA, 15 bp, Homo sapiens
gcccactgaagcacc

SEQ ID NO: 44712 - DNA, 15 bp, Homo sapiens
cccactgaagcaccg

SEQ ID NO: 44713 - DNA, 15 bp, Homo sapiens
ccactgaagcaccga

SEQ ID NO: 44714 - DNA, 15 bp, Homo sapiens
cactgaagcaccgat

SEQ ID NO: 44715 - DNA, 15 bp, Homo sapiens
actgaagcaccgatg

SEQ ID NO: 44716 - DNA, 15 bp, Homo sapiens
ctgaagcaccgatgg

SEQ ID NO: 44717 - DNA, 15 bp, Homo sapiens
tgaagcaccgatggt

SEQ ID NO: 44718 - DNA, 15 bp, Homo sapiens
gaagcaccgatggtg

SEQ ID NO: 44719 - DNA, 15 bp, Homo sapiens
aagcaccgatggtgg

SEQ ID NO: 44720 - DNA, 15 bp, Homo sapiens
agcaccgatggtggc

SEQ ID NO: 44721 - DNA, 15 bp, Homo sapiens
gcaccgatggtggcc

SEQ ID NO: 44722 - DNA, 15 bp, Homo sapiens
caccgatggtggcca

SEQ ID NO: 44723 - DNA, 15 bp, Homo sapiens
accgatggtggccag

SEQ ID NO: 44724 - DNA, 15 bp, Homo sapiens
ccgatggtggccaga

SEQ ID NO: 44725 - DNA, 15 bp, Homo sapiens
cgatggtggccagac

SEQ ID NO: 44726 - DNA, 15 bp, Homo sapiens
gatggtggccagact

SEQ ID NO: 44727 - DNA, 15 bp, Homo sapiens
atggtggccagactg

SEQ ID NO: 44728 - DNA, 15 bp, Homo sapiens
tggtggccagactgt

SEQ ID NO: 44729 - DNA, 15 bp, Homo sapiens
ggtggccagactgtg

SEQ ID NO: 44730 - DNA, 15 bp, Homo sapiens
gtggccagactgtga

SEQ ID NO: 44731 - DNA, 15 bp, Homo sapiens
tggccagactgtgac

SEQ ID NO: 44732 - DNA, 15 bp, Homo sapiens
ggccagactgtgact

SEQ ID NO: 44733 - DNA, 15 bp, Homo sapiens
gccagactgtgacta

SEQ ID NO: 44734 - DNA, 15 bp, Homo sapiens
ccagactgtgactat

SEQ ID NO: 44735 - DNA, 15 bp, Homo sapiens
cagactgtgactatg

SEQ ID NO: 44736 - DNA, 15 bp, Homo sapiens
agactgtgactatgt

SEQ ID NO: 44737 - DNA, 15 bp, Homo sapiens
gactgtgactatgtg

SEQ ID NO: 44738 - DNA, 15 bp, Homo sapiens
actgtgactatgtgg

SEQ ID NO: 44739 - DNA, 15 bp, Homo sapiens
ctgtgactatgtggg

SEQ ID NO: 44740 - DNA, 15 bp, Homo sapiens
tgtgactatgtgggt

SEQ ID NO: 44741 - DNA, 15 bp, Homo sapiens
gtgactatgtgggta

SEQ ID NO: 44742 - DNA, 15 bp, Homo sapiens
tgactatgtgggtaa

SEQ ID NO: 44743 - DNA, 15 bp, Homo sapiens
gactatgtgggtaaa

SEQ ID NO: 44744 - DNA, 15 bp, Homo sapiens
actatgtgggtaaag

SEQ ID NO: 44745 - DNA, 15 bp, Homo sapiens
ctatgtgggtaaagg

SEQ ID NO: 44746 - DNA, 15 bp, Homo sapiens
tatgtgggtaaaggc

SEQ ID NO: 44747 - DNA, 15 bp, Homo sapiens
atgtgggtaaaggca

SEQ ID NO: 44748 - DNA, 15 bp, Homo sapiens
tgtgggtaaaggcac

SEQ ID NO: 44749 - DNA, 15 bp, Homo sapiens
gtgggtaaaggcacc

SEQ ID NO: 44750 - DNA, 15 bp, Homo sapiens
tgggtaaaggcacca

SEQ ID NO: 44751 - DNA, 15 bp, Homo sapiens
gggtaaaggcaccat

SEQ ID NO: 44752 - DNA, 15 bp, Homo sapiens
ggtaaaggcaccatc

SEQ ID NO: 44753 - DNA, 15 bp, Homo sapiens
gtaaaggcaccatct

SEQ ID NO: 44754 - DNA, 15 bp, Homo sapiens
taaaggcaccatctg

SEQ ID NO: 44755 - DNA, 15 bp, Homo sapiens
aaaggcaccatctgc

SEQ ID NO: 44756 - DNA, 15 bp, Homo sapiens
aaggcaccatctgca

SEQ ID NO: 44757 - DNA, 15 bp, Homo sapiens
aggcaccatctgcaa

SEQ ID NO: 44758 - DNA, 15 bp, Homo sapiens
ggcaccatctgcaac

SEQ ID NO: 44759 - DNA, 15 bp, Homo sapiens
gcaccatctgcaacc

SEQ ID NO: 44760 - DNA, 15 bp, Homo sapiens
caccatctgcaacct

SEQ ID NO: 44761 - DNA, 15 bp, Homo sapiens
accatctgcaacctc

SEQ ID NO: 44762 - DNA, 15 bp, Homo sapiens
ccatctgcaacctcg

SEQ ID NO: 44763 - DNA, 15 bp, Homo sapiens
catctgcaacctcgg

SEQ ID NO: 44764 - DNA, 15 bp, Homo sapiens
atctgcaacctcggg

SEQ ID NO: 44765 - DNA, 15 bp, Homo sapiens
tctgcaacctcgggc

SEQ ID NO: 44766 - DNA, 15 bp, Homo sapiens
ctgcaacctcgggcc

SEQ ID NO: 44767 - DNA, 15 bp, Homo sapiens
tgcaacctcgggcca

SEQ ID NO: 44768 - DNA, 15 bp, Homo sapiens
gcaacctcgggccag

SEQ ID NO: 44769 - DNA, 15 bp, Homo sapiens
caacctcgggccaga

SEQ ID NO: 44770 - DNA, 15 bp, Homo sapiens
aacctcgggccagag

SEQ ID NO: 44771 - DNA, 15 bp, Homo sapiens
acctcgggccagagt

SEQ ID NO: 44772 - DNA, 15 bp, Homo sapiens
cctcgggccagagtg

SEQ ID NO: 44773 - DNA, 15 bp, Homo sapiens
ctcgggccagagtgc

SEQ ID NO: 44774 - DNA, 15 bp, Homo sapiens
tcgggccagagtgct

SEQ ID NO: 44775 - DNA, 15 bp, Homo sapiens
cgggccagagtgctt

SEQ ID NO: 44776 - DNA, 15 bp, Homo sapiens
gggccagagtgcttg

SEQ ID NO: 44777 - DNA, 15 bp, Homo sapiens
ggccagagtgcttgc

SEQ ID NO: 44778 - DNA, 15 bp, Homo sapiens
gccagagtgcttgct

SEQ ID NO: 44779 - DNA, 15 bp, Homo sapiens
ccagagtgcttgctc

SEQ ID NO: 44780 - DNA, 15 bp, Homo sapiens
cagagtgcttgctcg

SEQ ID NO: 44781 - DNA, 15 bp, Homo sapiens
agagtgcttgctcgt

SEQ ID NO: 44782 - DNA, 15 bp, Homo sapiens
gagtgcttgctcgtg

SEQ ID NO: 44783 - DNA, 15 bp, Homo sapiens
agtgcttgctcgtgg

SEQ ID NO: 44784 - DNA, 15 bp, Homo sapiens
gtgcttgctcgtgga

SEQ ID NO: 44785 - DNA, 15 bp, Homo sapiens
tgcttgctcgtggag

SEQ ID NO: 44786 - DNA, 15 bp, Homo sapiens
gcttgctcgtggaga

SEQ ID NO: 44787 - DNA, 15 bp, Homo sapiens
cttgctcgtggagaa

SEQ ID NO: 44788 - DNA, 15 bp, Homo sapiens
ttgctcgtggagaaa

SEQ ID NO: 44789 - DNA, 15 bp, Homo sapiens
tgctcgtggagaaat

SEQ ID NO: 44790 - DNA, 15 bp, Homo sapiens
gctcgtggagaaatc

SEQ ID NO: 44791 - DNA, 15 bp, Homo sapiens
ctcgtggagaaatct

SEQ ID NO: 44792 - DNA, 15 bp, Homo sapiens
tcgtggagaaatctc

SEQ ID NO: 44793 - DNA, 15 bp, Homo sapiens
cgtggagaaatctcc

SEQ ID NO: 44794 - DNA, 15 bp, Homo sapiens
gtggagaaatctccc

SEQ ID NO: 44795 - DNA, 15 bp, Homo sapiens
tggagaaatctccct

SEQ ID NO: 44796 - DNA, 15 bp, Homo sapiens
ggagaaatctccctg

SEQ ID NO: 44797 - DNA, 15 bp, Homo sapiens
gagaaatctccctga

SEQ ID NO: 44798 - DNA, 15 bp, Homo sapiens
agaaatctccctgac

SEQ ID NO: 44799 - DNA, 15 bp, Homo sapiens
gaaatctccctgacc

SEQ ID NO: 44800 - DNA, 15 bp, Homo sapiens
aaatctccctgaccc

SEQ ID NO: 44801 - DNA, 15 bp, Homo sapiens
aatctccctgaccct

SEQ ID NO: 44802 - DNA, 15 bp, Homo sapiens
atctccctgaccctg

SEQ ID NO: 44803 - DNA, 15 bp, Homo sapiens
tctccctgaccctgt

SEQ ID NO: 44804 - DNA, 15 bp, Homo sapiens
ctccctgaccctgtc

SEQ ID NO: 44805 - DNA, 15 bp, Homo sapiens
tccctgaccctgtca

SEQ ID NO: 44806 - DNA, 15 bp, Homo sapiens
ccctgaccctgtcac

SEQ ID NO: 44807 - DNA, 15 bp, Homo sapiens
cctgaccctgtcaca

SEQ ID NO: 44808 - DNA, 15 bp, Homo sapiens
ctgaccctgtcacag

SEQ ID NO: 44809 - DNA, 15 bp, Homo sapiens
tgaccctgtcacagc

SEQ ID NO: 44810 - DNA, 15 bp, Homo sapiens
gaccctgtcacagct

SEQ ID NO: 44811 - DNA, 15 bp, Homo sapiens
accctgtcacagctc

SEQ ID NO: 44812 - DNA, 15 bp, Homo sapiens
ccctgtcacagctcc

SEQ ID NO: 44813 - DNA, 15 bp, Homo sapiens
cctgtcacagctcct

SEQ ID NO: 44814 - DNA, 15 bp, Homo sapiens
ctgtcacagctccta

SEQ ID NO: 44815 - DNA, 15 bp, Homo sapiens
tgtcacagctcctac

SEQ ID NO: 44816 - DNA, 15 bp, Homo sapiens
gtcacagctcctacc

SEQ ID NO: 44817 - DNA, 15 bp, Homo sapiens
tcacagctcctaccc

SEQ ID NO: 44818 - DNA, 15 bp, Homo sapiens
cacagctcctaccca

SEQ ID NO: 44819 - DNA, 15 bp, Homo sapiens
acagctcctacccac

SEQ ID NO: 44820 - DNA, 15 bp, Homo sapiens
cagctcctacccacc

SEQ ID NO: 44821 - DNA, 15 bp, Homo sapiens
agctcctacccacct

SEQ ID NO: 44822 - DNA, 15 bp, Homo sapiens
gctcctacccacctg

SEQ ID NO: 44823 - DNA, 15 bp, Homo sapiens
ctcctacccacctgc

SEQ ID NO: 44824 - DNA, 15 bp, Homo sapiens
tcctacccacctgcc

SEQ ID NO: 44825 - DNA, 15 bp, Homo sapiens
cctacccacctgccc

SEQ ID NO: 44826 - DNA, 15 bp, Homo sapiens
ctacccacctgcccc

SEQ ID NO: 44827 - DNA, 15 bp, Homo sapiens
tacccacctgcccca

SEQ ID NO: 44828 - DNA, 15 bp, Homo sapiens
acccacctgccccat

SEQ ID NO: 44829 - DNA, 15 bp, Homo sapiens
cccacctgccccatc

SEQ ID NO: 44830 - DNA, 15 bp, Homo sapiens
ccacctgccccatct

SEQ ID NO: 44831 - DNA, 15 bp, Homo sapiens
cacctgccccatctc

SEQ ID NO: 44832 - DNA, 15 bp, Homo sapiens
acctgccccatctct

SEQ ID NO: 44833 - DNA, 15 bp, Homo sapiens
cctgccccatctctc

SEQ ID NO: 44834 - DNA, 15 bp, Homo sapiens
ctgccccatctctca

SEQ ID NO: 44835 - DNA, 15 bp, Homo sapiens
tgccccatctctcaa

SEQ ID NO: 44836 - DNA, 15 bp, Homo sapiens
gccccatctctcaag

SEQ ID NO: 44837 - DNA, 15 bp, Homo sapiens
ccccatctctcaagc

SEQ ID NO: 44838 - DNA, 15 bp, Homo sapiens
cccatctctcaagcc

SEQ ID NO: 44839 - DNA, 15 bp, Homo sapiens
ccatctctcaagcct

SEQ ID NO: 44840 - DNA, 15 bp, Homo sapiens
catctctcaagcctc

SEQ ID NO: 44841 - DNA, 15 bp, Homo sapiens
atctctcaagcctca

SEQ ID NO: 44842 - DNA, 15 bp, Homo sapiens
tctctcaagcctcaa

SEQ ID NO: 44843 - DNA, 15 bp, Homo sapiens
ctctcaagcctcaaa

SEQ ID NO: 44844 - DNA, 15 bp, Homo sapiens
tctcaagcctcaaat

SEQ ID NO: 44845 - DNA, 15 bp, Homo sapiens
ctcaagcctcaaatg

SEQ ID NO: 44846 - DNA, 15 bp, Homo sapiens
tcaagcctcaaatgc

SEQ ID NO: 44847 - DNA, 15 bp, Homo sapiens
caagcctcaaatgcc

SEQ ID NO: 44848 - DNA, 15 bp, Homo sapiens
aagcctcaaatgccc

SEQ ID NO: 44849 - DNA, 15 bp, Homo sapiens
agcctcaaatgccca

SEQ ID NO: 44850 - DNA, 15 bp, Homo sapiens
gcctcaaatgcccat

SEQ ID NO: 44851 - DNA, 15 bp, Homo sapiens
cctcaaatgcccatg

SEQ ID NO: 44852 - DNA, 15 bp, Homo sapiens
ctcaaatgcccatga

SEQ ID NO: 44853 - DNA, 15 bp, Homo sapiens
tcaaatgcccatgag

SEQ ID NO: 44854 - DNA, 15 bp, Homo sapiens
caaatgcccatgaga

SEQ ID NO: 44855 - DNA, 15 bp, Homo sapiens
aaatgcccatgagaa

SEQ ID NO: 44856 - DNA, 15 bp, Homo sapiens
aatgcccatgagaag

SEQ ID NO: 44857 - DNA, 15 bp, Homo sapiens
atgcccatgagaagg

SEQ ID NO: 44858 - DNA, 15 bp, Homo sapiens
tgcccatgagaagga

SEQ ID NO: 44859 - DNA, 15 bp, Homo sapiens
gcccatgagaaggat

SEQ ID NO: 44860 - DNA, 15 bp, Homo sapiens
cccatgagaaggatg

SEQ ID NO: 44861 - DNA, 15 bp, Homo sapiens
ccatgagaaggatgg

SEQ ID NO: 44862 - DNA, 15 bp, Homo sapiens
catgagaaggatggg

SEQ ID NO: 44863 - DNA, 15 bp, Homo sapiens
atgagaaggatgggg

SEQ ID NO: 44864 - DNA, 15 bp, Homo sapiens
tgagaaggatggggg

SEQ ID NO: 44865 - DNA, 15 bp, Homo sapiens
gagaaggatgggggg

SEQ ID NO: 44866 - DNA, 15 bp, Homo sapiens
agaaggatggggggc

SEQ ID NO: 44867 - DNA, 15 bp, Homo sapiens
gaaggatggggggcc

SEQ ID NO: 44868 - DNA, 15 bp, Homo sapiens
aaggatggggggccc

SEQ ID NO: 44869 - DNA, 15 bp, Homo sapiens
aggatggggggccct

SEQ ID NO: 44870 - DNA, 15 bp, Homo sapiens
ggatggggggccctc

SEQ ID NO: 44871 - DNA, 15 bp, Homo sapiens
gatggggggccctca

SEQ ID NO: 44872 - DNA, 15 bp, Homo sapiens
atggggggccctcag

SEQ ID NO: 44873 - DNA, 15 bp, Homo sapiens
tggggggccctcaga

SEQ ID NO: 44874 - DNA, 15 bp, Homo sapiens
ggggggccctcagag

SEQ ID NO: 44875 - DNA, 15 bp, Homo sapiens
gggggccctcagagt

SEQ ID NO: 44876 - DNA, 15 bp, Homo sapiens
ggggccctcagagtg

SEQ ID NO: 44877 - DNA, 15 bp, Homo sapiens
gggccctcagagtga

SEQ ID NO: 44878 - DNA, 15 bp, Homo sapiens
ggccctcagagtgaa

SEQ ID NO: 44879 - DNA, 15 bp, Homo sapiens
gccctcagagtgaac

SEQ ID NO: 44880 - DNA, 15 bp, Homo sapiens
ccctcagagtgaaca

SEQ ID NO: 44881 - DNA, 15 bp, Homo sapiens
cctcagagtgaacat

SEQ ID NO: 44882 - DNA, 15 bp, Homo sapiens
ctcagagtgaacatc

SEQ ID NO: 44883 - DNA, 15 bp, Homo sapiens
tcagagtgaacatct

SEQ ID NO: 44884 - DNA, 15 bp, Homo sapiens
cagagtgaacatctt

SEQ ID NO: 44885 - DNA, 15 bp, Homo sapiens
agagtgaacatctta

SEQ ID NO: 44886 - DNA, 15 bp, Homo sapiens
gagtgaacatcttag

SEQ ID NO: 44887 - DNA, 15 bp, Homo sapiens
agtgaacatcttagg

SEQ ID NO: 44888 - DNA, 15 bp, Homo sapiens
gtgaacatcttagga

SEQ ID NO: 44889 - DNA, 15 bp, Homo sapiens
tgaacatcttaggac

SEQ ID NO: 44890 - DNA, 15 bp, Homo sapiens
gaacatcttaggaca

SEQ ID NO: 44891 - DNA, 15 bp, Homo sapiens
aacatcttaggacag

SEQ ID NO: 44892 - DNA, 15 bp, Homo sapiens
acatcttaggacaga

SEQ ID NO: 44893 - DNA, 15 bp, Homo sapiens
catcttaggacagaa

SEQ ID NO: 44894 - DNA, 15 bp, Homo sapiens
atcttaggacagaag

SEQ ID NO: 44895 - DNA, 15 bp, Homo sapiens
tcttaggacagaaga

SEQ ID NO: 44896 - DNA, 15 bp, Homo sapiens
cttaggacagaagat

SEQ ID NO: 44897 - DNA, 15 bp, Homo sapiens
ttaggacagaagata

SEQ ID NO: 44898 - DNA, 15 bp, Homo sapiens
taggacagaagatat

SEQ ID NO: 44899 - DNA, 15 bp, Homo sapiens
aggacagaagatatg

SEQ ID NO: 44900 - DNA, 15 bp, Homo sapiens
ggacagaagatatgc

SEQ ID NO: 44901 - DNA, 15 bp, Homo sapiens
gacagaagatatgct

SEQ ID NO: 44902 - DNA, 15 bp, Homo sapiens
acagaagatatgctc

SEQ ID NO: 44903 - DNA, 15 bp, Homo sapiens
cagaagatatgctca

SEQ ID NO: 44904 - DNA, 15 bp, Homo sapiens
agaagatatgctcaa

SEQ ID NO: 44905 - DNA, 15 bp, Homo sapiens
gaagatatgctcaaa

SEQ ID NO: 44906 - DNA, 15 bp, Homo sapiens
aagatatgctcaaag

SEQ ID NO: 44907 - DNA, 15 bp, Homo sapiens
agatatgctcaaagg

SEQ ID NO: 44908 - DNA, 15 bp, Homo sapiens
gatatgctcaaagga

SEQ ID NO: 44909 - DNA, 15 bp, Homo sapiens
atatgctcaaaggaa

SEQ ID NO: 44910 - DNA, 15 bp, Homo sapiens
tatgctcaaaggaaa

SEQ ID NO: 44911 - DNA, 15 bp, Homo sapiens
atgctcaaaggaaac

SEQ ID NO: 44912 - DNA, 15 bp, Homo sapiens
tgctcaaaggaaact

SEQ ID NO: 44913 - DNA, 15 bp, Homo sapiens
gctcaaaggaaactg

SEQ ID NO: 44914 - DNA, 15 bp, Homo sapiens
ctcaaaggaaactgc

SEQ ID NO: 44915 - DNA, 15 bp, Homo sapiens
tcaaaggaaactgcc

SEQ ID NO: 44916 - DNA, 15 bp, Homo sapiens
caaaggaaactgcct

SEQ ID NO: 44917 - DNA, 15 bp, Homo sapiens
aaaggaaactgcctg

SEQ ID NO: 44918 - DNA, 15 bp, Homo sapiens
aaggaaactgcctga

SEQ ID NO: 44919 - DNA, 15 bp, Homo sapiens
aggaaactgcctgag

SEQ ID NO: 44920 - DNA, 15 bp, Homo sapiens
ggaaactgcctgagg

SEQ ID NO: 44921 - DNA, 15 bp, Homo sapiens
gaaactgcctgagga

SEQ ID NO: 44922 - DNA, 15 bp, Homo sapiens
aaactgcctgaggaa

SEQ ID NO: 44923 - DNA, 15 bp, Homo sapiens
aactgcctgaggaaa

SEQ ID NO: 44924 - DNA, 15 bp, Homo sapiens
actgcctgaggaaag

SEQ ID NO: 44925 - DNA, 15 bp, Homo sapiens
ctgcctgaggaaagg

SEQ ID NO: 44926 - DNA, 15 bp, Homo sapiens
tgcctgaggaaaggg

SEQ ID NO: 44927 - DNA, 15 bp, Homo sapiens
gcctgaggaaagggg

SEQ ID NO: 44928 - DNA, 15 bp, Homo sapiens
cctgaggaaaggggg

SEQ ID NO: 44929 - DNA, 15 bp, Homo sapiens
ctgaggaaagggggt

SEQ ID NO: 44930 - DNA, 15 bp, Homo sapiens
tgaggaaagggggtg

SEQ ID NO: 44931 - DNA, 15 bp, Homo sapiens
gaggaaagggggtgt

SEQ ID NO: 44932 - DNA, 15 bp, Homo sapiens
aggaaagggggtgtt

SEQ ID NO: 44933 - DNA, 15 bp, Homo sapiens
ggaaagggggtgttg

SEQ ID NO: 44934 - DNA, 15 bp, Homo sapiens
gaaagggggtgttgc

SEQ ID NO: 44935 - DNA, 15 bp, Homo sapiens
aaagggggtgttgcc

SEQ ID NO: 44936 - DNA, 15 bp, Homo sapiens
aagggggtgttgccc

SEQ ID NO: 44937 - DNA, 15 bp, Homo sapiens
agggggtgttgcccc

SEQ ID NO: 44938 - DNA, 15 bp, Homo sapiens
gggggtgttgcccca

SEQ ID NO: 44939 - DNA, 15 bp, Homo sapiens
ggggtgttgccccaa

SEQ ID NO: 44940 - DNA, 15 bp, Homo sapiens
gggtgttgccccaag

SEQ ID NO: 44941 - DNA, 15 bp, Homo sapiens
ggtgttgccccaaga

SEQ ID NO: 44942 - DNA, 15 bp, Homo sapiens
gtgttgccccaagaa

SEQ ID NO: 44943 - DNA, 15 bp, Homo sapiens
tgttgccccaagaac

SEQ ID NO: 44944 - DNA, 15 bp, Homo sapiens
gttgccccaagaaca

SEQ ID NO: 44945 - DNA, 15 bp, Homo sapiens
ttgccccaagaacac

SEQ ID NO: 44946 - DNA, 15 bp, Homo sapiens
tgccccaagaacacc

SEQ ID NO: 44947 - DNA, 15 bp, Homo sapiens
gccccaagaacaccc

SEQ ID NO: 44948 - DNA, 15 bp, Homo sapiens
ccccaagaacacccc

SEQ ID NO: 44949 - DNA, 15 bp, Homo sapiens
cccaagaacaccccc

SEQ ID NO: 44950 - DNA, 15 bp, Homo sapiens
ccaagaacaccccca

SEQ ID NO: 44951 - DNA, 15 bp, Homo sapiens
caagaacacccccac

SEQ ID NO: 44952 - DNA, 15 bp, Homo sapiens
aagaacacccccaca

SEQ ID NO: 44953 - DNA, 15 bp, Homo sapiens
agaacacccccacac

SEQ ID NO: 44954 - DNA, 15 bp, Homo sapiens
gaacacccccacacc

SEQ ID NO: 44955 - DNA, 15 bp, Homo sapiens
aacacccccacacct

SEQ ID NO: 44956 - DNA, 15 bp, Homo sapiens
acacccccacacctt

SEQ ID NO: 44957 - DNA, 15 bp, Homo sapiens
cacccccacaccttt

SEQ ID NO: 44958 - DNA, 15 bp, Homo sapiens
acccccacacctttg

SEQ ID NO: 44959 - DNA, 15 bp, Homo sapiens
cccccacacctttgc

SEQ ID NO: 44960 - DNA, 15 bp, Homo sapiens
ccccacacctttgca

SEQ ID NO: 44961 - DNA, 15 bp, Homo sapiens
cccacacctttgcat

SEQ ID NO: 44962 - DNA, 15 bp, Homo sapiens
ccacacctttgcatg

SEQ ID NO: 44963 - DNA, 15 bp, Homo sapiens
cacacctttgcatgg

SEQ ID NO: 44964 - DNA, 15 bp, Homo sapiens
acacctttgcatggt

SEQ ID NO: 44965 - DNA, 15 bp, Homo sapiens
cacctttgcatggtt

SEQ ID NO: 44966 - DNA, 15 bp, Homo sapiens
acctttgcatggttc

SEQ ID NO: 44967 - DNA, 15 bp, Homo sapiens
cctttgcatggttcc

SEQ ID NO: 44968 - DNA, 15 bp, Homo sapiens
ctttgcatggttccc

SEQ ID NO: 44969 - DNA, 15 bp, Homo sapiens
tttgcatggttccca

SEQ ID NO: 44970 - DNA, 15 bp, Homo sapiens
ttgcatggttcccac

SEQ ID NO: 44971 - DNA, 15 bp, Homo sapiens
tgcatggttcccacc

SEQ ID NO: 44972 - DNA, 15 bp, Homo sapiens
gcatggttcccacct

SEQ ID NO: 44973 - DNA, 15 bp, Homo sapiens
catggttcccaccta

SEQ ID NO: 44974 - DNA, 15 bp, Homo sapiens
atggttcccacctat

SEQ ID NO: 44975 - DNA, 15 bp, Homo sapiens
tggttcccacctatc

SEQ ID NO: 44976 - DNA, 15 bp, Homo sapiens
ggttcccacctatcc

SEQ ID NO: 44977 - DNA, 15 bp, Homo sapiens
gttcccacctatcca

SEQ ID NO: 44978 - DNA, 15 bp, Homo sapiens
ttcccacctatccac

SEQ ID NO: 44979 - DNA, 15 bp, Homo sapiens
tcccacctatccaca

SEQ ID NO: 44980 - DNA, 15 bp, Homo sapiens
cccacctatccacat

SEQ ID NO: 44981 - DNA, 15 bp, Homo sapiens
ccacctatccacatt

SEQ ID NO: 44982 - DNA, 15 bp, Homo sapiens
cacctatccacattt

SEQ ID NO: 44983 - DNA, 15 bp, Homo sapiens
acctatccacatttt

SEQ ID NO: 44984 - DNA, 15 bp, Homo sapiens
cctatccacattttc

SEQ ID NO: 44985 - DNA, 15 bp, Homo sapiens
ctatccacattttct

SEQ ID NO: 44986 - DNA, 15 bp, Homo sapiens
tatccacattttctc

SEQ ID NO: 44987 - DNA, 15 bp, Homo sapiens
atccacattttctcc

SEQ ID NO: 44988 - DNA, 15 bp, Homo sapiens
tccacattttctcca

SEQ ID NO: 44989 - DNA, 15 bp, Homo sapiens
ccacattttctccag

SEQ ID NO: 44990 - DNA, 15 bp, Homo sapiens
cacattttctccagt

SEQ ID NO: 44991 - DNA, 15 bp, Homo sapiens
acattttctccagtc

SEQ ID NO: 44992 - DNA, 15 bp, Homo sapiens
cattttctccagtca

SEQ ID NO: 44993 - DNA, 15 bp, Homo sapiens
attttctccagtcaa

SEQ ID NO: 44994 - DNA, 15 bp, Homo sapiens
ttttctccagtcaag

SEQ ID NO: 44995 - DNA, 15 bp, Homo sapiens
tttctccagtcaagt

SEQ ID NO: 44996 - DNA, 15 bp, Homo sapiens
ttctccagtcaagtc

SEQ ID NO: 44997 - DNA, 15 bp, Homo sapiens
tctccagtcaagtcc

SEQ ID NO: 44998 - DNA, 15 bp, Homo sapiens
ctccagtcaagtccc

SEQ ID NO: 44999 - DNA, 15 bp, Homo sapiens
tccagtcaagtccct

SEQ ID NO: 45000 - DNA, 15 bp, Homo sapiens
ccagtcaagtcccta

SEQ ID NO: 45001 - DNA, 15 bp, Homo sapiens
cagtcaagtccctaa

SEQ ID NO: 45002 - DNA, 15 bp, Homo sapiens
agtcaagtccctaat

SEQ ID NO: 45003 - DNA, 15 bp, Homo sapiens
gtcaagtccctaata

SEQ ID NO: 45004 - DNA, 15 bp, Homo sapiens
tcaagtccctaataa

SEQ ID NO: 45005 - DNA, 15 bp, Homo sapiens
caagtccctaataag

SEQ ID NO: 45006 - DNA, 15 bp, Homo sapiens
aagtccctaataagc

SEQ ID NO: 45007 - DNA, 15 bp, Homo sapiens
agtccctaataagct

SEQ ID NO: 45008 - DNA, 15 bp, Homo sapiens
gtccctaataagcta

SEQ ID NO: 45009 - DNA, 15 bp, Homo sapiens
tccctaataagctag

SEQ ID NO: 45010 - DNA, 15 bp, Homo sapiens
ccctaataagctagg

SEQ ID NO: 45011 - DNA, 15 bp, Homo sapiens
cctaataagctaggg

SEQ ID NO: 45012 - DNA, 15 bp, Homo sapiens
ctaataagctagggg

SEQ ID NO: 45013 - DNA, 15 bp, Homo sapiens
taataagctagggga

SEQ ID NO: 45014 - DNA, 15 bp, Homo sapiens
aataagctaggggac

SEQ ID NO: 45015 - DNA, 15 bp, Homo sapiens
ataagctaggggacc

SEQ ID NO: 45016 - DNA, 15 bp, Homo sapiens
taagctaggggaccc

SEQ ID NO: 45017 - DNA, 15 bp, Homo sapiens
aagctaggggacccc

SEQ ID NO: 45018 - DNA, 15 bp, Homo sapiens
agctaggggacccct

SEQ ID NO: 45019 - DNA, 15 bp, Homo sapiens
gctaggggacccctc

SEQ ID NO: 45020 - DNA, 15 bp, Homo sapiens
ctaggggacccctct

SEQ ID NO: 45021 - DNA, 15 bp, Homo sapiens
taggggacccctctg

SEQ ID NO: 45022 - DNA, 15 bp, Homo sapiens
aggggacccctctgg

SEQ ID NO: 45023 - DNA, 15 bp, Homo sapiens
ggggacccctctggg

SEQ ID NO: 45024 - DNA, 15 bp, Homo sapiens
gggacccctctgggt

SEQ ID NO: 45025 - DNA, 15 bp, Homo sapiens
ggacccctctgggta

SEQ ID NO: 45026 - DNA, 15 bp, Homo sapiens
gacccctctgggtac

SEQ ID NO: 45027 - DNA, 15 bp, Homo sapiens
acccctctgggtacc

SEQ ID NO: 45028 - DNA, 15 bp, Homo sapiens
cccctctgggtaccc

SEQ ID NO: 45029 - DNA, 15 bp, Homo sapiens
ccctctgggtaccca

SEQ ID NO: 45030 - DNA, 15 bp, Homo sapiens
cctctgggtacccat

SEQ ID NO: 45031 - DNA, 15 bp, Homo sapiens
ctctgggtacccatc

SEQ ID NO: 45032 - DNA, 15 bp, Homo sapiens
tctgggtacccatcc

SEQ ID NO: 45033 - DNA, 15 bp, Homo sapiens
ctgggtacccatccc

SEQ ID NO: 45034 - DNA, 15 bp, Homo sapiens
tgggtacccatccca

SEQ ID NO: 45035 - DNA, 15 bp, Homo sapiens
gggtacccatcccac

SEQ ID NO: 45036 - DNA, 15 bp, Homo sapiens
ggtacccatcccaca

SEQ ID NO: 45037 - DNA, 15 bp, Homo sapiens
gtacccatcccacag

SEQ ID NO: 45038 - DNA, 15 bp, Homo sapiens
tacccatcccacagt

SEQ ID NO: 45039 - DNA, 15 bp, Homo sapiens
acccatcccacagtg

SEQ ID NO: 45040 - DNA, 15 bp, Homo sapiens
cccatcccacagtgg

SEQ ID NO: 45041 - DNA, 15 bp, Homo sapiens
ccatcccacagtggg

SEQ ID NO: 45042 - DNA, 15 bp, Homo sapiens
catcccacagtgggg

SEQ ID NO: 45043 - DNA, 15 bp, Homo sapiens
atcccacagtggggc

SEQ ID NO: 45044 - DNA, 15 bp, Homo sapiens
tcccacagtggggcg

SEQ ID NO: 45045 - DNA, 15 bp, Homo sapiens
cccacagtggggcga

SEQ ID NO: 45046 - DNA, 15 bp, Homo sapiens
ccacagtggggcgag

SEQ ID NO: 45047 - DNA, 15 bp, Homo sapiens
cacagtggggcgagg

SEQ ID NO: 45048 - DNA, 15 bp, Homo sapiens
acagtggggcgaggg

SEQ ID NO: 45049 - DNA, 15 bp, Homo sapiens
cagtggggcgagggc

SEQ ID NO: 45050 - DNA, 15 bp, Homo sapiens
agtggggcgagggcc

SEQ ID NO: 45051 - DNA, 15 bp, Homo sapiens
gtggggcgagggcct

SEQ ID NO: 45052 - DNA, 15 bp, Homo sapiens
tggggcgagggcctg

SEQ ID NO: 45053 - DNA, 15 bp, Homo sapiens
ggggcgagggcctgt

SEQ ID NO: 45054 - DNA, 15 bp, Homo sapiens
gggcgagggcctgtc

SEQ ID NO: 45055 - DNA, 15 bp, Homo sapiens
ggcgagggcctgtcc

SEQ ID NO: 45056 - DNA, 15 bp, Homo sapiens
gcgagggcctgtcca

SEQ ID NO: 45057 - DNA, 15 bp, Homo sapiens
cgagggcctgtccag

SEQ ID NO: 45058 - DNA, 15 bp, Homo sapiens
gagggcctgtccagt

SEQ ID NO: 45059 - DNA, 15 bp, Homo sapiens
agggcctgtccagtg

SEQ ID NO: 45060 - DNA, 15 bp, Homo sapiens
gggcctgtccagtgg

SEQ ID NO: 45061 - DNA, 15 bp, Homo sapiens
ggcctgtccagtggg

SEQ ID NO: 45062 - DNA, 15 bp, Homo sapiens
gcctgtccagtggga

SEQ ID NO: 45063 - DNA, 15 bp, Homo sapiens
cctgtccagtgggaa

SEQ ID NO: 45064 - DNA, 15 bp, Homo sapiens
ctgtccagtgggaac

SEQ ID NO: 45065 - DNA, 15 bp, Homo sapiens
tgtccagtgggaaca

SEQ ID NO: 45066 - DNA, 15 bp, Homo sapiens
gtccagtgggaacac

SEQ ID NO: 45067 - DNA, 15 bp, Homo sapiens
tccagtgggaacaca

SEQ ID NO: 45068 - DNA, 15 bp, Homo sapiens
ccagtgggaacacag

SEQ ID NO: 45069 - DNA, 15 bp, Homo sapiens
cagtgggaacacagg

SEQ ID NO: 45070 - DNA, 15 bp, Homo sapiens
agtgggaacacagga

SEQ ID NO: 45071 - DNA, 15 bp, Homo sapiens
gtgggaacacaggaa

SEQ ID NO: 45072 - DNA, 15 bp, Homo sapiens
tgggaacacaggaac

SEQ ID NO: 45073 - DNA, 15 bp, Homo sapiens
gggaacacaggaacc

SEQ ID NO: 45074 - DNA, 15 bp, Homo sapiens
ggaacacaggaacct

SEQ ID NO: 45075 - DNA, 15 bp, Homo sapiens
gaacacaggaacctg

SEQ ID NO: 45076 - DNA, 15 bp, Homo sapiens
aacacaggaacctgt

SEQ ID NO: 45077 - DNA, 15 bp, Homo sapiens
acacaggaacctgtg

SEQ ID NO: 45078 - DNA, 15 bp, Homo sapiens
cacaggaacctgtgt

SEQ ID NO: 45079 - DNA, 15 bp, Homo sapiens
acaggaacctgtgtg

SEQ ID NO: 45080 - DNA, 15 bp, Homo sapiens
caggaacctgtgtgg

SEQ ID NO: 45081 - DNA, 15 bp, Homo sapiens
aggaacctgtgtgga

SEQ ID NO: 45082 - DNA, 15 bp, Homo sapiens
ggaacctgtgtggat

SEQ ID NO: 45083 - DNA, 15 bp, Homo sapiens
gaacctgtgtggata

SEQ ID NO: 45084 - DNA, 15 bp, Homo sapiens
aacctgtgtggataa

SEQ ID NO: 45085 - DNA, 15 bp, Homo sapiens
acctgtgtggataaa

SEQ ID NO: 45086 - DNA, 15 bp, Homo sapiens
cctgtgtggataaag

SEQ ID NO: 45087 - DNA, 15 bp, Homo sapiens
ctgtgtggataaagg

SEQ ID NO: 45088 - DNA, 15 bp, Homo sapiens
tgtgtggataaaggt

SEQ ID NO: 45089 - DNA, 15 bp, Homo sapiens
gtgtggataaaggtg

SEQ ID NO: 45090 - DNA, 15 bp, Homo sapiens
tgtggataaaggtgt

SEQ ID NO: 45091 - DNA, 15 bp, Homo sapiens
gtggataaaggtgtg

SEQ ID NO: 45092 - DNA, 15 bp, Homo sapiens
tggataaaggtgtgg

SEQ ID NO: 45093 - DNA, 15 bp, Homo sapiens
ggataaaggtgtggt

SEQ ID NO: 45094 - DNA, 15 bp, Homo sapiens
gataaaggtgtggtg

SEQ ID NO: 45095 - DNA, 15 bp, Homo sapiens
ataaaggtgtggtgc

SEQ ID NO: 45096 - DNA, 15 bp, Homo sapiens
taaaggtgtggtgct

SEQ ID NO: 45097 - DNA, 15 bp, Homo sapiens
aaaggtgtggtgctg

SEQ ID NO: 45098 - DNA, 15 bp, Homo sapiens
aaggtgtggtgctga

SEQ ID NO: 45099 - DNA, 15 bp, Homo sapiens
aggtgtggtgctgac

SEQ ID NO: 45100 - DNA, 15 bp, Homo sapiens
ggtgtggtgctgaca

SEQ ID NO: 45101 - DNA, 15 bp, Homo sapiens
gtgtggtgctgacac

SEQ ID NO: 45102 - DNA, 15 bp, Homo sapiens
tgtggtgctgacaca

SEQ ID NO: 45103 - DNA, 15 bp, Homo sapiens
gtggtgctgacacaa

SEQ ID NO: 45104 - DNA, 15 bp, Homo sapiens
tggtgctgacacaaa

SEQ ID NO: 45105 - DNA, 15 bp, Homo sapiens
ggtgctgacacaaaa

SEQ ID NO: 45106 - DNA, 15 bp, Homo sapiens
gtgctgacacaaaaa

SEQ ID NO: 45107 - DNA, 15 bp, Homo sapiens
tgctgacacaaaaag

SEQ ID NO: 45108 - DNA, 15 bp, Homo sapiens
gctgacacaaaaagc

SEQ ID NO: 45109 - DNA, 15 bp, Homo sapiens
ctgacacaaaaagcc

SEQ ID NO: 45110 - DNA, 15 bp, Homo sapiens
tgacacaaaaagcca

SEQ ID NO: 45111 - DNA, 15 bp, Homo sapiens
gacacaaaaagccac

SEQ ID NO: 45112 - DNA, 15 bp, Homo sapiens
acacaaaaagccacc

SEQ ID NO: 45113 - DNA, 15 bp, Homo sapiens
cacaaaaagccaccc

SEQ ID NO: 45114 - DNA, 15 bp, Homo sapiens
acaaaaagccaccct

SEQ ID NO: 45115 - DNA, 15 bp, Homo sapiens
caaaaagccaccctc

SEQ ID NO: 45116 - DNA, 15 bp, Homo sapiens
aaaaagccaccctcc

SEQ ID NO: 45117 - DNA, 15 bp, Homo sapiens
aaaagccaccctcca

SEQ ID NO: 45118 - DNA, 15 bp, Homo sapiens
aaagccaccctccaa

SEQ ID NO: 45119 - DNA, 15 bp, Homo sapiens
aagccaccctccaag

SEQ ID NO: 45120 - DNA, 15 bp, Homo sapiens
agccaccctccaagc

SEQ ID NO: 45121 - DNA, 15 bp, Homo sapiens
gccaccctccaagcc

SEQ ID NO: 45122 - DNA, 15 bp, Homo sapiens
ccaccctccaagcct

SEQ ID NO: 45123 - DNA, 15 bp, Homo sapiens
caccctccaagcctg

SEQ ID NO: 45124 - DNA, 15 bp, Homo sapiens
accctccaagcctgc

SEQ ID NO: 45125 - DNA, 15 bp, Homo sapiens
ccctccaagcctgcc

SEQ ID NO: 45126 - DNA, 15 bp, Homo sapiens
cctccaagcctgcca

SEQ ID NO: 45127 - DNA, 15 bp, Homo sapiens
ctccaagcctgccac

SEQ ID NO: 45128 - DNA, 15 bp, Homo sapiens
tccaagcctgccacg

SEQ ID NO: 45129 - DNA, 15 bp, Homo sapiens
ccaagcctgccacgc

SEQ ID NO: 45130 - DNA, 15 bp, Homo sapiens
caagcctgccacgcc

SEQ ID NO: 45131 - DNA, 15 bp, Homo sapiens
aagcctgccacgccc

SEQ ID NO: 45132 - DNA, 15 bp, Homo sapiens
agcctgccacgccca

SEQ ID NO: 45133 - DNA, 15 bp, Homo sapiens
gcctgccacgcccat

SEQ ID NO: 45134 - DNA, 15 bp, Homo sapiens
cctgccacgcccatc

SEQ ID NO: 45135 - DNA, 15 bp, Homo sapiens
ctgccacgcccatcc

SEQ ID NO: 45136 - DNA, 15 bp, Homo sapiens
tgccacgcccatcca

SEQ ID NO: 45137 - DNA, 15 bp, Homo sapiens
gccacgcccatccac

SEQ ID NO: 45138 - DNA, 15 bp, Homo sapiens
ccacgcccatccaca

SEQ ID NO: 45139 - DNA, 15 bp, Homo sapiens
cacgcccatccacac

SEQ ID NO: 45140 - DNA, 15 bp, Homo sapiens
acgcccatccacaca

SEQ ID NO: 45141 - DNA, 15 bp, Homo sapiens
cgcccatccacacat

SEQ ID NO: 45142 - DNA, 15 bp, Homo sapiens
gcccatccacacatc

SEQ ID NO: 45143 - DNA, 15 bp, Homo sapiens
cccatccacacatct

SEQ ID NO: 45144 - DNA, 15 bp, Homo sapiens
ccatccacacatctc

SEQ ID NO: 45145 - DNA, 15 bp, Homo sapiens
catccacacatctca

SEQ ID NO: 45146 - DNA, 15 bp, Homo sapiens
atccacacatctcat

SEQ ID NO: 45147 - DNA, 15 bp, Homo sapiens
tccacacatctcatg

SEQ ID NO: 45148 - DNA, 15 bp, Homo sapiens
ccacacatctcatgt

SEQ ID NO: 45149 - DNA, 15 bp, Homo sapiens
cacacatctcatgtc

SEQ ID NO: 45150 - DNA, 15 bp, Homo sapiens
acacatctcatgtcc

SEQ ID NO: 45151 - DNA, 15 bp, Homo sapiens
cacatctcatgtcct

SEQ ID NO: 45152 - DNA, 15 bp, Homo sapiens
acatctcatgtcctc

SEQ ID NO: 45153 - DNA, 15 bp, Homo sapiens
catctcatgtcctca

SEQ ID NO: 45154 - DNA, 15 bp, Homo sapiens
atctcatgtcctcag

SEQ ID NO: 45155 - DNA, 15 bp, Homo sapiens
tctcatgtcctcagg

SEQ ID NO: 45156 - DNA, 15 bp, Homo sapiens
ctcatgtcctcaggc

SEQ ID NO: 45157 - DNA, 15 bp, Homo sapiens
tcatgtcctcaggcg

SEQ ID NO: 45158 - DNA, 15 bp, Homo sapiens
catgtcctcaggcgc

SEQ ID NO: 45159 - DNA, 15 bp, Homo sapiens
atgtcctcaggcgca

SEQ ID NO: 45160 - DNA, 15 bp, Homo sapiens
tgtcctcaggcgcac

SEQ ID NO: 45161 - DNA, 15 bp, Homo sapiens
gtcctcaggcgcacc

SEQ ID NO: 45162 - DNA, 15 bp, Homo sapiens
tcctcaggcgcaccc

SEQ ID NO: 45163 - DNA, 15 bp, Homo sapiens
cctcaggcgcaccca

SEQ ID NO: 45164 - DNA, 15 bp, Homo sapiens
ctcaggcgcacccac

SEQ ID NO: 45165 - DNA, 15 bp, Homo sapiens
tcaggcgcacccacc

SEQ ID NO: 45166 - DNA, 15 bp, Homo sapiens
caggcgcacccacca

SEQ ID NO: 45167 - DNA, 15 bp, Homo sapiens
aggcgcacccaccag

SEQ ID NO: 45168 - DNA, 15 bp, Homo sapiens
ggcgcacccaccaga

SEQ ID NO: 45169 - DNA, 15 bp, Homo sapiens
gcgcacccaccagat

SEQ ID NO: 45170 - DNA, 15 bp, Homo sapiens
cgcacccaccagatg

SEQ ID NO: 45171 - DNA, 15 bp, Homo sapiens
gcacccaccagatgg

SEQ ID NO: 45172 - DNA, 15 bp, Homo sapiens
cacccaccagatgga

SEQ ID NO: 45173 - DNA, 15 bp, Homo sapiens
acccaccagatggaa

SEQ ID NO: 45174 - DNA, 15 bp, Homo sapiens
cccaccagatggaag

SEQ ID NO: 45175 - DNA, 15 bp, Homo sapiens
ccaccagatggaagg

SEQ ID NO: 45176 - DNA, 15 bp, Homo sapiens
caccagatggaaggt

SEQ ID NO: 45177 - DNA, 15 bp, Homo sapiens
accagatggaaggtg

SEQ ID NO: 45178 - DNA, 15 bp, Homo sapiens
ccagatggaaggtga

SEQ ID NO: 45179 - DNA, 15 bp, Homo sapiens
cagatggaaggtgaa

SEQ ID NO: 45180 - DNA, 15 bp, Homo sapiens
agatggaaggtgaac

SEQ ID NO: 45181 - DNA, 15 bp, Homo sapiens
gatggaaggtgaact

SEQ ID NO: 45182 - DNA, 15 bp, Homo sapiens
atggaaggtgaactt

SEQ ID NO: 45183 - DNA, 15 bp, Homo sapiens
tggaaggtgaacttc

SEQ ID NO: 45184 - DNA, 15 bp, Homo sapiens
ggaaggtgaacttct

SEQ ID NO: 45185 - DNA, 15 bp, Homo sapiens
gaaggtgaacttctc

SEQ ID NO: 45186 - DNA, 15 bp, Homo sapiens
aaggtgaacttctct

SEQ ID NO: 45187 - DNA, 15 bp, Homo sapiens
aggtgaacttctctg

SEQ ID NO: 45188 - DNA, 15 bp, Homo sapiens
ggtgaacttctctga

SEQ ID NO: 45189 - DNA, 15 bp, Homo sapiens
gtgaacttctctgag

SEQ ID NO: 45190 - DNA, 15 bp, Homo sapiens
tgaacttctctgagt

SEQ ID NO: 45191 - DNA, 15 bp, Homo sapiens
gaacttctctgagtg

SEQ ID NO: 45192 - DNA, 15 bp, Homo sapiens
aacttctctgagtgc

SEQ ID NO: 45193 - DNA, 15 bp, Homo sapiens
acttctctgagtgcg

SEQ ID NO: 45194 - DNA, 15 bp, Homo sapiens
cttctctgagtgcgt

SEQ ID NO: 45195 - DNA, 15 bp, Homo sapiens
ttctctgagtgcgtg

SEQ ID NO: 45196 - DNA, 15 bp, Homo sapiens
tctctgagtgcgtga

SEQ ID NO: 45197 - DNA, 15 bp, Homo sapiens
ctctgagtgcgtgaa

SEQ ID NO: 45198 - DNA, 15 bp, Homo sapiens
tctgagtgcgtgaag

SEQ ID NO: 45199 - DNA, 15 bp, Homo sapiens
ctgagtgcgtgaagc

SEQ ID NO: 45200 - DNA, 15 bp, Homo sapiens
tgagtgcgtgaagcg

SEQ ID NO: 45201 - DNA, 15 bp, Homo sapiens
gagtgcgtgaagcgg

SEQ ID NO: 45202 - DNA, 15 bp, Homo sapiens
agtgcgtgaagcggg

SEQ ID NO: 45203 - DNA, 15 bp, Homo sapiens
gtgcgtgaagcggga

SEQ ID NO: 45204 - DNA, 15 bp, Homo sapiens
tgcgtgaagcgggag

SEQ ID NO: 45205 - DNA, 15 bp, Homo sapiens
gcgtgaagcgggagc

SEQ ID NO: 45206 - DNA, 15 bp, Homo sapiens
cgtgaagcgggagcc

SEQ ID NO: 45207 - DNA, 15 bp, Homo sapiens
gtgaagcgggagccc

SEQ ID NO: 45208 - DNA, 15 bp, Homo sapiens
tgaagcgggagccct

SEQ ID NO: 45209 - DNA, 15 bp, Homo sapiens
gaagcgggagccctt

SEQ ID NO: 45210 - DNA, 15 bp, Homo sapiens
aagcgggagccctta

SEQ ID NO: 45211 - DNA, 15 bp, Homo sapiens
agcgggagcccttag

SEQ ID NO: 45212 - DNA, 15 bp, Homo sapiens
gcgggagcccttagg

SEQ ID NO: 45213 - DNA, 15 bp, Homo sapiens
cgggagcccttagga

SEQ ID NO: 45214 - DNA, 15 bp, Homo sapiens
gggagcccttaggag

SEQ ID NO: 45215 - DNA, 15 bp, Homo sapiens
ggagcccttaggagc

SEQ ID NO: 45216 - DNA, 15 bp, Homo sapiens
gagcccttaggagca

SEQ ID NO: 45217 - DNA, 15 bp, Homo sapiens
agcccttaggagcac

SEQ ID NO: 45218 - DNA, 15 bp, Homo sapiens
gcccttaggagcacc

SEQ ID NO: 45219 - DNA, 15 bp, Homo sapiens
cccttaggagcacca

SEQ ID NO: 45220 - DNA, 15 bp, Homo sapiens
ccttaggagcaccag

SEQ ID NO: 45221 - DNA, 15 bp, Homo sapiens
cttaggagcaccagt

SEQ ID NO: 45222 - DNA, 15 bp, Homo sapiens
ttaggagcaccagtc

SEQ ID NO: 45223 - DNA, 15 bp, Homo sapiens
taggagcaccagtct

SEQ ID NO: 45224 - DNA, 15 bp, Homo sapiens
aggagcaccagtctt

SEQ ID NO: 45225 - DNA, 15 bp, Homo sapiens
ggagcaccagtcttg

SEQ ID NO: 45226 - DNA, 15 bp, Homo sapiens
gagcaccagtcttgg

SEQ ID NO: 45227 - DNA, 15 bp, Homo sapiens
agcaccagtcttggc

SEQ ID NO: 45228 - DNA, 15 bp, Homo sapiens
gcaccagtcttggcc

SEQ ID NO: 45229 - DNA, 15 bp, Homo sapiens
caccagtcttggccc

SEQ ID NO: 45230 - DNA, 15 bp, Homo sapiens
accagtcttggcccc

SEQ ID NO: 45231 - DNA, 15 bp, Homo sapiens
ccagtcttggcccca

SEQ ID NO: 45232 - DNA, 15 bp, Homo sapiens
cagtcttggccccag

SEQ ID NO: 45233 - DNA, 15 bp, Homo sapiens
agtcttggccccagc

SEQ ID NO: 45234 - DNA, 15 bp, Homo sapiens
gtcttggccccagca

SEQ ID NO: 45235 - DNA, 15 bp, Homo sapiens
tcttggccccagcac

SEQ ID NO: 45236 - DNA, 15 bp, Homo sapiens
cttggccccagcacc

SEQ ID NO: 45237 - DNA, 15 bp, Homo sapiens
ttggccccagcaccc

SEQ ID NO: 45238 - DNA, 15 bp, Homo sapiens
tggccccagcacccc

SEQ ID NO: 45239 - DNA, 15 bp, Homo sapiens
ggccccagcacccca

SEQ ID NO: 45240 - DNA, 15 bp, Homo sapiens
gccccagcaccccag

SEQ ID NO: 45241 - DNA, 15 bp, Homo sapiens
ccccagcaccccagg

SEQ ID NO: 45242 - DNA, 15 bp, Homo sapiens
cccagcaccccaggc

SEQ ID NO: 45243 - DNA, 15 bp, Homo sapiens
ccagcaccccaggcc

SEQ ID NO: 45244 - DNA, 15 bp, Homo sapiens
cagcaccccaggcct

SEQ ID NO: 45245 - DNA, 15 bp, Homo sapiens
agcaccccaggcctg

SEQ ID NO: 45246 - DNA, 15 bp, Homo sapiens
gcaccccaggcctgc

SEQ ID NO: 45247 - DNA, 15 bp, Homo sapiens
caccccaggcctgca

SEQ ID NO: 45248 - DNA, 15 bp, Homo sapiens
accccaggcctgcag

SEQ ID NO: 45249 - DNA, 15 bp, Homo sapiens
ccccaggcctgcagc

SEQ ID NO: 45250 - DNA, 15 bp, Homo sapiens
cccaggcctgcagca

SEQ ID NO: 45251 - DNA, 15 bp, Homo sapiens
ccaggcctgcagcag

SEQ ID NO: 45252 - DNA, 15 bp, Homo sapiens
caggcctgcagcagt

SEQ ID NO: 45253 - DNA, 15 bp, Homo sapiens
aggcctgcagcagtt

SEQ ID NO: 45254 - DNA, 15 bp, Homo sapiens
ggcctgcagcagttc

SEQ ID NO: 45255 - DNA, 15 bp, Homo sapiens
gcctgcagcagttct

SEQ ID NO: 45256 - DNA, 15 bp, Homo sapiens
cctgcagcagttctc

SEQ ID NO: 45257 - DNA, 15 bp, Homo sapiens
ctgcagcagttctcc

SEQ ID NO: 45258 - DNA, 15 bp, Homo sapiens
tgcagcagttctccc

SEQ ID NO: 45259 - DNA, 15 bp, Homo sapiens
gcagcagttctccca

SEQ ID NO: 45260 - DNA, 15 bp, Homo sapiens
cagcagttctcccag

SEQ ID NO: 45261 - DNA, 15 bp, Homo sapiens
agcagttctcccagg

SEQ ID NO: 45262 - DNA, 15 bp, Homo sapiens
gcagttctcccaggt

SEQ ID NO: 45263 - DNA, 15 bp, Homo sapiens
cagttctcccaggtc

SEQ ID NO: 45264 - DNA, 15 bp, Homo sapiens
agttctcccaggtcc

SEQ ID NO: 45265 - DNA, 15 bp, Homo sapiens
gttctcccaggtccc

SEQ ID NO: 45266 - DNA, 15 bp, Homo sapiens
ttctcccaggtcccg

SEQ ID NO: 45267 - DNA, 15 bp, Homo sapiens
tctcccaggtcccgg

SEQ ID NO: 45268 - DNA, 15 bp, Homo sapiens
ctcccaggtcccggg

SEQ ID NO: 45269 - DNA, 15 bp, Homo sapiens
tcccaggtcccgggc

SEQ ID NO: 45270 - DNA, 15 bp, Homo sapiens
cccaggtcccgggct

SEQ ID NO: 45271 - DNA, 15 bp, Homo sapiens
ccaggtcccgggctt

SEQ ID NO: 45272 - DNA, 15 bp, Homo sapiens
caggtcccgggcttg

SEQ ID NO: 45273 - DNA, 15 bp, Homo sapiens
aggtcccgggcttgt

SEQ ID NO: 45274 - DNA, 15 bp, Homo sapiens
ggtcccgggcttgta

SEQ ID NO: 45275 - DNA, 15 bp, Homo sapiens
gtcccgggcttgtat

SEQ ID NO: 45276 - DNA, 15 bp, Homo sapiens
tcccgggcttgtatg

SEQ ID NO: 45277 - DNA, 15 bp, Homo sapiens
cccgggcttgtatgg

SEQ ID NO: 45278 - DNA, 15 bp, Homo sapiens
ccgggcttgtatggg

SEQ ID NO: 45279 - DNA, 15 bp, Homo sapiens
cgggcttgtatgggg

SEQ ID NO: 45280 - DNA, 15 bp, Homo sapiens
gggcttgtatggggg

SEQ ID NO: 45281 - DNA, 15 bp, Homo sapiens
ggcttgtatgggggc

SEQ ID NO: 45282 - DNA, 15 bp, Homo sapiens
gcttgtatgggggcc

SEQ ID NO: 45283 - DNA, 15 bp, Homo sapiens
cttgtatgggggccc

SEQ ID NO: 45284 - DNA, 15 bp, Homo sapiens
ttgtatgggggcccc

SEQ ID NO: 45285 - DNA, 15 bp, Homo sapiens
tgtatgggggcccca

SEQ ID NO: 45286 - DNA, 15 bp, Homo sapiens
gtatgggggccccaa

SEQ ID NO: 45287 - DNA, 15 bp, Homo sapiens
tatgggggccccaag

SEQ ID NO: 45288 - DNA, 15 bp, Homo sapiens
atgggggccccaagc

SEQ ID NO: 45289 - DNA, 15 bp, Homo sapiens
tgggggccccaagca

SEQ ID NO: 45290 - DNA, 15 bp, Homo sapiens
gggggccccaagcag

SEQ ID NO: 45291 - DNA, 15 bp, Homo sapiens
ggggccccaagcagg

SEQ ID NO: 45292 - DNA, 15 bp, Homo sapiens
gggccccaagcaggc

SEQ ID NO: 45293 - DNA, 15 bp, Homo sapiens
ggccccaagcaggcc

SEQ ID NO: 45294 - DNA, 15 bp, Homo sapiens
gccccaagcaggccc

SEQ ID NO: 45295 - DNA, 15 bp, Homo sapiens
ccccaagcaggcccc

SEQ ID NO: 45296 - DNA, 15 bp, Homo sapiens
cccaagcaggcccca

SEQ ID NO: 45297 - DNA, 15 bp, Homo sapiens
ccaagcaggccccag

SEQ ID NO: 45298 - DNA, 15 bp, Homo sapiens
caagcaggccccagc

SEQ ID NO: 45299 - DNA, 15 bp, Homo sapiens
aagcaggccccagct

SEQ ID NO: 45300 - DNA, 15 bp, Homo sapiens
agcaggccccagctt

SEQ ID NO: 45301 - DNA, 15 bp, Homo sapiens
gcaggccccagcttt

SEQ ID NO: 45302 - DNA, 15 bp, Homo sapiens
caggccccagctttg

SEQ ID NO: 45303 - DNA, 15 bp, Homo sapiens
aggccccagctttgg

SEQ ID NO: 45304 - DNA, 15 bp, Homo sapiens
ggccccagctttggc

SEQ ID NO: 45305 - DNA, 15 bp, Homo sapiens
gccccagctttggcg

SEQ ID NO: 45306 - DNA, 15 bp, Homo sapiens
ccccagctttggcgc

SEQ ID NO: 45307 - DNA, 15 bp, Homo sapiens
cccagctttggcgca

SEQ ID NO: 45308 - DNA, 15 bp, Homo sapiens
ccagctttggcgcag

SEQ ID NO: 45309 - DNA, 15 bp, Homo sapiens
cagctttggcgcaga

SEQ ID NO: 45310 - DNA, 15 bp, Homo sapiens
agctttggcgcagat

SEQ ID NO: 45311 - DNA, 15 bp, Homo sapiens
gctttggcgcagatg

SEQ ID NO: 45312 - DNA, 15 bp, Homo sapiens
ctttggcgcagatgc

SEQ ID NO: 45313 - DNA, 15 bp, Homo sapiens
tttggcgcagatgct

SEQ ID NO: 45314 - DNA, 15 bp, Homo sapiens
ttggcgcagatgctc

SEQ ID NO: 45315 - DNA, 15 bp, Homo sapiens
tggcgcagatgctca

SEQ ID NO: 45316 - DNA, 15 bp, Homo sapiens
ggcgcagatgctcag

SEQ ID NO: 45317 - DNA, 15 bp, Homo sapiens
gcgcagatgctcagt

SEQ ID NO: 45318 - DNA, 15 bp, Homo sapiens
cgcagatgctcagtc

SEQ ID NO: 45319 - DNA, 15 bp, Homo sapiens
gcagatgctcagtca

SEQ ID NO: 45320 - DNA, 15 bp, Homo sapiens
cagatgctcagtcag

SEQ ID NO: 45321 - DNA, 15 bp, Homo sapiens
agatgctcagtcagt

SEQ ID NO: 45322 - DNA, 15 bp, Homo sapiens
gatgctcagtcagtt

SEQ ID NO: 45323 - DNA, 15 bp, Homo sapiens
atgctcagtcagttg

SEQ ID NO: 45324 - DNA, 15 bp, Homo sapiens
tgctcagtcagttgc

SEQ ID NO: 45325 - DNA, 15 bp, Homo sapiens
gcctgtagtcccaac

SEQ ID NO: 45326 - DNA, 15 bp, Homo sapiens
cctgtagtcccaact

SEQ ID NO: 45327 - DNA, 15 bp, Homo sapiens
tagtcccaactactc

SEQ ID NO: 45328 - DNA, 15 bp, Homo sapiens
agtcccaactactca

SEQ ID NO: 45329 - DNA, 15 bp, Homo sapiens
gtcccaactactcag

SEQ ID NO: 45330 - DNA, 15 bp, Homo sapiens
tcccaactactcagg

SEQ ID NO: 45331 - DNA, 15 bp, Homo sapiens
cccaactactcagga

SEQ ID NO: 45332 - DNA, 15 bp, Homo sapiens
ccaactactcaggag

SEQ ID NO: 45333 - DNA, 15 bp, Homo sapiens
caactactcaggagg

SEQ ID NO: 45334 - DNA, 15 bp, Homo sapiens
aactactcaggaggc

SEQ ID NO: 45335 - DNA, 15 bp, Homo sapiens
actactcaggaggcc

SEQ ID NO: 45336 - DNA, 15 bp, Homo sapiens
ctactcaggaggcca

SEQ ID NO: 45337 - DNA, 15 bp, Homo sapiens
tactcaggaggccaa

SEQ ID NO: 45338 - DNA, 15 bp, Homo sapiens
actcaggaggccaag

SEQ ID NO: 45339 - DNA, 15 bp, Homo sapiens
ctcaggaggccaagg

SEQ ID NO: 45340 - DNA, 15 bp, Homo sapiens
tcaggaggccaaggc

SEQ ID NO: 45341 - DNA, 15 bp, Homo sapiens
caggaggccaaggcg

SEQ ID NO: 45342 - DNA, 15 bp, Homo sapiens
aggaggccaaggcgg

SEQ ID NO: 45343 - DNA, 15 bp, Homo sapiens
ggaggccaaggcggg

SEQ ID NO: 45344 - DNA, 15 bp, Homo sapiens
gaggccaaggcggga

SEQ ID NO: 45345 - DNA, 15 bp, Homo sapiens
aggccaaggcgggaa

SEQ ID NO: 45346 - DNA, 15 bp, Homo sapiens
ggccaaggcgggaag

SEQ ID NO: 45347 - DNA, 15 bp, Homo sapiens
gccaaggcgggaaga

SEQ ID NO: 45348 - DNA, 15 bp, Homo sapiens
ccaaggcgggaagat

SEQ ID NO: 45349 - DNA, 15 bp, Homo sapiens
caaggcgggaagatt

SEQ ID NO: 45350 - DNA, 15 bp, Homo sapiens
aaggcgggaagattg

SEQ ID NO: 45351 - DNA, 15 bp, Homo sapiens
aggcgggaagattgc

SEQ ID NO: 45352 - DNA, 15 bp, Homo sapiens
ggcgggaagattgct

SEQ ID NO: 45353 - DNA, 15 bp, Homo sapiens
gcgggaagattgctt

SEQ ID NO: 45354 - DNA, 15 bp, Homo sapiens
cgggaagattgcttg

SEQ ID NO: 45355 - DNA, 15 bp, Homo sapiens
gaagattgcttgagg

SEQ ID NO: 45356 - DNA, 15 bp, Homo sapiens
aagattgcttgaggc

SEQ ID NO: 45357 - DNA, 15 bp, Homo sapiens
agattgcttgaggcc

SEQ ID NO: 45358 - DNA, 15 bp, Homo sapiens
gattgcttgaggcca

SEQ ID NO: 45359 - DNA, 15 bp, Homo sapiens
attgcttgaggccag

SEQ ID NO: 45360 - DNA, 15 bp, Homo sapiens
ttgcttgaggccagg

SEQ ID NO: 45361 - DNA, 15 bp, Homo sapiens
tgcttgaggccagga

SEQ ID NO: 45362 - DNA, 15 bp, Homo sapiens
gcttgaggccaggag

SEQ ID NO: 45363 - DNA, 15 bp, Homo sapiens
cttgaggccaggagc

SEQ ID NO: 45364 - DNA, 15 bp, Homo sapiens
ttgaggccaggagct

SEQ ID NO: 45365 - DNA, 15 bp, Homo sapiens
tgaggccaggagctt

SEQ ID NO: 45366 - DNA, 15 bp, Homo sapiens
gaggccaggagctta

SEQ ID NO: 45367 - DNA, 15 bp, Homo sapiens
aggccaggagcttaa

SEQ ID NO: 45368 - DNA, 15 bp, Homo sapiens
ggccaggagcttaag

SEQ ID NO: 45369 - DNA, 15 bp, Homo sapiens
gccaggagcttaaga

SEQ ID NO: 45370 - DNA, 15 bp, Homo sapiens
ccaggagcttaagac

SEQ ID NO: 45371 - DNA, 15 bp, Homo sapiens
caggagcttaagacc

SEQ ID NO: 45372 - DNA, 15 bp, Homo sapiens
aggagcttaagacca

SEQ ID NO: 45373 - DNA, 15 bp, Homo sapiens
ggagcttaagaccag

SEQ ID NO: 45374 - DNA, 15 bp, Homo sapiens
gagcttaagaccagc

SEQ ID NO: 45375 - DNA, 15 bp, Homo sapiens
agcttaagaccagcc

SEQ ID NO: 45376 - DNA, 15 bp, Homo sapiens
gcttaagaccagcct

SEQ ID NO: 45377 - DNA, 15 bp, Homo sapiens
cttaagaccagcctg

SEQ ID NO: 45378 - DNA, 15 bp, Homo sapiens
ttaagaccagcctgg

SEQ ID NO: 45379 - DNA, 15 bp, Homo sapiens
taagaccagcctggg

SEQ ID NO: 45380 - DNA, 15 bp, Homo sapiens
aagaccagcctgggc

SEQ ID NO: 45381 - DNA, 15 bp, Homo sapiens
agaccagcctgggca

SEQ ID NO: 45382 - DNA, 15 bp, Homo sapiens
gaccagcctgggcaa

SEQ ID NO: 45383 - DNA, 15 bp, Homo sapiens
accagcctgggcaac

SEQ ID NO: 45384 - DNA, 15 bp, Homo sapiens
cagcctgggcaacat

SEQ ID NO: 45385 - DNA, 15 bp, Homo sapiens
agcctgggcaacatc

SEQ ID NO: 45386 - DNA, 15 bp, Homo sapiens
gcctgggcaacatct

SEQ ID NO: 45387 - DNA, 15 bp, Homo sapiens
cctgggcaacatctc

SEQ ID NO: 45388 - DNA, 15 bp, Homo sapiens
ctgggcaacatctct

SEQ ID NO: 45389 - DNA, 15 bp, Homo sapiens
tgggcaacatctcta

SEQ ID NO: 45390 - DNA, 15 bp, Homo sapiens
gggcaacatctctac

SEQ ID NO: 45391 - DNA, 15 bp, Homo sapiens
ggcaacatctctaca

SEQ ID NO: 45392 - DNA, 15 bp, Homo sapiens
gcaacatctctacaa

SEQ ID NO: 45393 - DNA, 15 bp, Homo sapiens
caacatctctacaaa

SEQ ID NO: 45394 - DNA, 15 bp, Homo sapiens
aacatctctacaaaa

SEQ ID NO: 45395 - DNA, 15 bp, Homo sapiens
acatctctacaaaag

SEQ ID NO: 45396 - DNA, 15 bp, Homo sapiens
catctctacaaaagc

SEQ ID NO: 45397 - DNA, 15 bp, Homo sapiens
atctctacaaaagcg

SEQ ID NO: 45398 - DNA, 15 bp, Homo sapiens
tctctacaaaagcga

SEQ ID NO: 45399 - DNA, 15 bp, Homo sapiens
ctctacaaaagcgag

SEQ ID NO: 45400 - DNA, 15 bp, Homo sapiens
tctacaaaagcgaga

SEQ ID NO: 45401 - DNA, 15 bp, Homo sapiens
ctacaaaagcgagac

SEQ ID NO: 45402 - DNA, 15 bp, Homo sapiens
tacaaaagcgagacc

SEQ ID NO: 45403 - DNA, 15 bp, Homo sapiens
acaaaagcgagaccc

SEQ ID NO: 45404 - DNA, 15 bp, Homo sapiens
caaaagcgagacccc

SEQ ID NO: 45405 - DNA, 15 bp, Homo sapiens
aaaagcgagacccca

SEQ ID NO: 45406 - DNA, 15 bp, Homo sapiens
aaagcgagaccccat

SEQ ID NO: 45407 - DNA, 15 bp, Homo sapiens
aagcgagaccccatc

SEQ ID NO: 45408 - DNA, 15 bp, Homo sapiens
agcgagaccccatct

SEQ ID NO: 45409 - DNA, 15 bp, Homo sapiens
gcgagaccccatctc

SEQ ID NO: 45410 - DNA, 15 bp, Homo sapiens
cgagaccccatctct

SEQ ID NO: 45411 - DNA, 15 bp, Homo sapiens
gagaccccatctcta

SEQ ID NO: 45412 - DNA, 15 bp, Homo sapiens
agaccccatctctac

SEQ ID NO: 45413 - DNA, 15 bp, Homo sapiens
gaccccatctctacg

SEQ ID NO: 45414 - DNA, 15 bp, Homo sapiens
accccatctctacga

SEQ ID NO: 45415 - DNA, 15 bp, Homo sapiens
ccccatctctacgaa

SEQ ID NO: 45416 - DNA, 15 bp, Homo sapiens
cccatctctacgaaa

SEQ ID NO: 45417 - DNA, 15 bp, Homo sapiens
ccatctctacgaaaa

SEQ ID NO: 45418 - DNA, 15 bp, Homo sapiens
catctctacgaaaaa

SEQ ID NO: 45419 - DNA, 15 bp, Homo sapiens
atctctacgaaaaat

SEQ ID NO: 45420 - DNA, 15 bp, Homo sapiens
tctctacgaaaaatt

SEQ ID NO: 45421 - DNA, 15 bp, Homo sapiens
ctctacgaaaaattt

SEQ ID NO: 45422 - DNA, 15 bp, Homo sapiens
tctacgaaaaattta

SEQ ID NO: 45423 - DNA, 15 bp, Homo sapiens
ctacgaaaaatttaa

SEQ ID NO: 45424 - DNA, 15 bp, Homo sapiens
tacgaaaaatttaaa

SEQ ID NO: 45425 - DNA, 15 bp, Homo sapiens
acgaaaaatttaaaa

SEQ ID NO: 45426 - DNA, 15 bp, Homo sapiens
cgaaaaatttaaaaa

SEQ ID NO: 45427 - DNA, 15 bp, Homo sapiens
gaaaaatttaaaaat

SEQ ID NO: 45428 - DNA, 15 bp, Homo sapiens
aaaaatttaaaaatt

SEQ ID NO: 45429 - DNA, 15 bp, Homo sapiens
aaaatttaaaaattc

SEQ ID NO: 45430 - DNA, 15 bp, Homo sapiens
aaatttaaaaattct

SEQ ID NO: 45431 - DNA, 15 bp, Homo sapiens
aatttaaaaattctc

SEQ ID NO: 45432 - DNA, 15 bp, Homo sapiens
atttaaaaattctcg

SEQ ID NO: 45433 - DNA, 15 bp, Homo sapiens
tttaaaaattctcgg

SEQ ID NO: 45434 - DNA, 15 bp, Homo sapiens
ttaaaaattctcggg

SEQ ID NO: 45435 - DNA, 15 bp, Homo sapiens
taaaaattctcgggc

SEQ ID NO: 45436 - DNA, 15 bp, Homo sapiens
aaaaattctcgggca

SEQ ID NO: 45437 - DNA, 15 bp, Homo sapiens
aaaattctcgggcag

SEQ ID NO: 45438 - DNA, 15 bp, Homo sapiens
aaattctcgggcagg

SEQ ID NO: 45439 - DNA, 15 bp, Homo sapiens
aattctcgggcaggg

SEQ ID NO: 45440 - DNA, 15 bp, Homo sapiens
attctcgggcagggt

SEQ ID NO: 45441 - DNA, 15 bp, Homo sapiens
ttctcgggcagggtg

SEQ ID NO: 45442 - DNA, 15 bp, Homo sapiens
tctcgggcagggtgg

SEQ ID NO: 45443 - DNA, 15 bp, Homo sapiens
ctcgggcagggtggc

SEQ ID NO: 45444 - DNA, 15 bp, Homo sapiens
tcgggcagggtggca

SEQ ID NO: 45445 - DNA, 15 bp, Homo sapiens
cgggcagggtggcat

SEQ ID NO: 45446 - DNA, 15 bp, Homo sapiens
gggcagggtggcatg

SEQ ID NO: 45447 - DNA, 15 bp, Homo sapiens
ggcagggtggcatgt

SEQ ID NO: 45448 - DNA, 15 bp, Homo sapiens
gcagggtggcatgtg

SEQ ID NO: 45449 - DNA, 15 bp, Homo sapiens
cagggtggcatgtgc

SEQ ID NO: 45450 - DNA, 15 bp, Homo sapiens
agggtggcatgtgcc

SEQ ID NO: 45451 - DNA, 15 bp, Homo sapiens
gggtggcatgtgcct

SEQ ID NO: 45452 - DNA, 15 bp, Homo sapiens
ggtggcatgtgccta

SEQ ID NO: 45453 - DNA, 15 bp, Homo sapiens
gtggcatgtgcctat

SEQ ID NO: 45454 - DNA, 15 bp, Homo sapiens
tggcatgtgcctata

SEQ ID NO: 45455 - DNA, 15 bp, Homo sapiens
ggcatgtgcctatag

SEQ ID NO: 45456 - DNA, 15 bp, Homo sapiens
gcatgtgcctatagt

SEQ ID NO: 45457 - DNA, 15 bp, Homo sapiens
catgtgcctatagtc

SEQ ID NO: 45458 - DNA, 15 bp, Homo sapiens
atgtgcctatagtcc

SEQ ID NO: 45459 - DNA, 15 bp, Homo sapiens
tgtgcctatagtcct

SEQ ID NO: 45460 - DNA, 15 bp, Homo sapiens
gtgcctatagtccta

SEQ ID NO: 45461 - DNA, 15 bp, Homo sapiens
tgcctatagtcctag

SEQ ID NO: 45462 - DNA, 15 bp, Homo sapiens
gcctatagtcctagc

SEQ ID NO: 45463 - DNA, 15 bp, Homo sapiens
cctatagtcctagct

SEQ ID NO: 45464 - DNA, 15 bp, Homo sapiens
ctatagtcctagcta

SEQ ID NO: 45465 - DNA, 15 bp, Homo sapiens
tatagtcctagctac

SEQ ID NO: 45466 - DNA, 15 bp, Homo sapiens
atagtcctagctact

SEQ ID NO: 45467 - DNA, 15 bp, Homo sapiens
tagtcctagctacta

SEQ ID NO: 45468 - DNA, 15 bp, Homo sapiens
agtcctagctactag

SEQ ID NO: 45469 - DNA, 15 bp, Homo sapiens
gtcctagctactagt

SEQ ID NO: 45470 - DNA, 15 bp, Homo sapiens
tcctagctactagtg

SEQ ID NO: 45471 - DNA, 15 bp, Homo sapiens
cctagctactagtga

SEQ ID NO: 45472 - DNA, 15 bp, Homo sapiens
ctagctactagtgag

SEQ ID NO: 45473 - DNA, 15 bp, Homo sapiens
tagctactagtgagg

SEQ ID NO: 45474 - DNA, 15 bp, Homo sapiens
agctactagtgaggc

SEQ ID NO: 45475 - DNA, 15 bp, Homo sapiens
gctactagtgaggca

SEQ ID NO: 45476 - DNA, 15 bp, Homo sapiens
ctactagtgaggcag

SEQ ID NO: 45477 - DNA, 15 bp, Homo sapiens
tactagtgaggcaga

SEQ ID NO: 45478 - DNA, 15 bp, Homo sapiens
actagtgaggcagag

SEQ ID NO: 45479 - DNA, 15 bp, Homo sapiens
ctagtgaggcagagg

SEQ ID NO: 45480 - DNA, 15 bp, Homo sapiens
tagtgaggcagaggc

SEQ ID NO: 45481 - DNA, 15 bp, Homo sapiens
agtgaggcagaggca

SEQ ID NO: 45482 - DNA, 15 bp, Homo sapiens
gtgaggcagaggcag

SEQ ID NO: 45483 - DNA, 15 bp, Homo sapiens
tgaggcagaggcagg

SEQ ID NO: 45484 - DNA, 15 bp, Homo sapiens
gaggcagaggcagga

SEQ ID NO: 45485 - DNA, 15 bp, Homo sapiens
aggcagaggcaggag

SEQ ID NO: 45486 - DNA, 15 bp, Homo sapiens
ggcagaggcaggaga

SEQ ID NO: 45487 - DNA, 15 bp, Homo sapiens
gcagaggcaggagaa

SEQ ID NO: 45488 - DNA, 15 bp, Homo sapiens
cagaggcaggagaat

SEQ ID NO: 45489 - DNA, 15 bp, Homo sapiens
agaggcaggagaatc

SEQ ID NO: 45490 - DNA, 15 bp, Homo sapiens
gaggcaggagaatct

SEQ ID NO: 45491 - DNA, 15 bp, Homo sapiens
aggcaggagaatctc

SEQ ID NO: 45492 - DNA, 15 bp, Homo sapiens
ggcaggagaatctct

SEQ ID NO: 45493 - DNA, 15 bp, Homo sapiens
gcaggagaatctctt

SEQ ID NO: 45494 - DNA, 15 bp, Homo sapiens
caggagaatctcttg

SEQ ID NO: 45495 - DNA, 15 bp, Homo sapiens
aggagaatctcttga

SEQ ID NO: 45496 - DNA, 15 bp, Homo sapiens
ggagaatctcttgag

SEQ ID NO: 45497 - DNA, 15 bp, Homo sapiens
gagaatctcttgagg

SEQ ID NO: 45498 - DNA, 15 bp, Homo sapiens
agaatctcttgaggc

SEQ ID NO: 45499 - DNA, 15 bp, Homo sapiens
gaatctcttgaggcc

SEQ ID NO: 45500 - DNA, 15 bp, Homo sapiens
aatctcttgaggcca

SEQ ID NO: 45501 - DNA, 15 bp, Homo sapiens
atctcttgaggccag

SEQ ID NO: 45502 - DNA, 15 bp, Homo sapiens
tctcttgaggccagg

SEQ ID NO: 45503 - DNA, 15 bp, Homo sapiens
ctcttgaggccagga

SEQ ID NO: 45504 - DNA, 15 bp, Homo sapiens
tcttgaggccaggag

SEQ ID NO: 45505 - DNA, 15 bp, Homo sapiens
cttgaggccaggagt

SEQ ID NO: 45506 - DNA, 15 bp, Homo sapiens
ttgaggccaggagtt

SEQ ID NO: 45507 - DNA, 15 bp, Homo sapiens
tgaggccaggagttc

SEQ ID NO: 45508 - DNA, 15 bp, Homo sapiens
gaggccaggagttca

SEQ ID NO: 45509 - DNA, 15 bp, Homo sapiens
aggccaggagttcaa

SEQ ID NO: 45510 - DNA, 15 bp, Homo sapiens
ggccaggagttcaag

SEQ ID NO: 45511 - DNA, 15 bp, Homo sapiens
gccaggagttcaaga

SEQ ID NO: 45512 - DNA, 15 bp, Homo sapiens
ccaggagttcaagac

SEQ ID NO: 45513 - DNA, 15 bp, Homo sapiens
ttcaagaccagcctg

SEQ ID NO: 45514 - DNA, 15 bp, Homo sapiens
caagaccagcctggg

SEQ ID NO: 45515 - DNA, 15 bp, Homo sapiens
accagcctgggcaat

SEQ ID NO: 45516 - DNA, 15 bp, Homo sapiens
ccagcctgggcaata

SEQ ID NO: 45517 - DNA, 15 bp, Homo sapiens
cagcctgggcaatat

SEQ ID NO: 45518 - DNA, 15 bp, Homo sapiens
agcctgggcaatata

SEQ ID NO: 45519 - DNA, 15 bp, Homo sapiens
gcctgggcaatatag

SEQ ID NO: 45520 - DNA, 15 bp, Homo sapiens
cctgggcaatatagc

SEQ ID NO: 45521 - DNA, 15 bp, Homo sapiens
ctgggcaatatagca

SEQ ID NO: 45522 - DNA, 15 bp, Homo sapiens
tgggcaatatagcaa

SEQ ID NO: 45523 - DNA, 15 bp, Homo sapiens
gggcaatatagcaag

SEQ ID NO: 45524 - DNA, 15 bp, Homo sapiens
ggcaatatagcaaga

SEQ ID NO: 45525 - DNA, 15 bp, Homo sapiens
gcaatatagcaagac

SEQ ID NO: 45526 - DNA, 15 bp, Homo sapiens
caatatagcaagaca

SEQ ID NO: 45527 - DNA, 15 bp, Homo sapiens
aatatagcaagacac

SEQ ID NO: 45528 - DNA, 15 bp, Homo sapiens
atatagcaagacact

SEQ ID NO: 45529 - DNA, 15 bp, Homo sapiens
tatagcaagacactt

SEQ ID NO: 45530 - DNA, 15 bp, Homo sapiens
atagcaagacactta

SEQ ID NO: 45531 - DNA, 15 bp, Homo sapiens
tagcaagacacttac

SEQ ID NO: 45532 - DNA, 15 bp, Homo sapiens
agcaagacacttacc

SEQ ID NO: 45533 - DNA, 15 bp, Homo sapiens
gcaagacacttacct

SEQ ID NO: 45534 - DNA, 15 bp, Homo sapiens
caagacacttacctc

SEQ ID NO: 45535 - DNA, 15 bp, Homo sapiens
aagacacttacctct

SEQ ID NO: 45536 - DNA, 15 bp, Homo sapiens
agacacttacctcta

SEQ ID NO: 45537 - DNA, 15 bp, Homo sapiens
gacacttacctctaa

SEQ ID NO: 45538 - DNA, 15 bp, Homo sapiens
acacttacctctaaa

SEQ ID NO: 45539 - DNA, 15 bp, Homo sapiens
cacttacctctaaaa

SEQ ID NO: 45540 - DNA, 15 bp, Homo sapiens
acttacctctaaaaa

SEQ ID NO: 45541 - DNA, 15 bp, Homo sapiens
cttacctctaaaaaa

SEQ ID NO: 45542 - DNA, 15 bp, Homo sapiens
ttacctctaaaaaaa

SEQ ID NO: 45543 - DNA, 15 bp, Homo sapiens
tacctctaaaaaaat

SEQ ID NO: 45544 - DNA, 15 bp, Homo sapiens
acctctaaaaaaatt

SEQ ID NO: 45545 - DNA, 15 bp, Homo sapiens
cctctaaaaaaatta

SEQ ID NO: 45546 - DNA, 15 bp, Homo sapiens
ctctaaaaaaattaa

SEQ ID NO: 45547 - DNA, 15 bp, Homo sapiens
tctaaaaaaattaaa

SEQ ID NO: 45548 - DNA, 15 bp, Homo sapiens
ctaaaaaaattaaaa

SEQ ID NO: 45549 - DNA, 15 bp, Homo sapiens
taaaaaaattaaaat

SEQ ID NO: 45550 - DNA, 15 bp, Homo sapiens
aaaaaaattaaaata

SEQ ID NO: 45551 - DNA, 15 bp, Homo sapiens
aaaaaattaaaatat

SEQ ID NO: 45552 - DNA, 15 bp, Homo sapiens
aaaaattaaaatatt

SEQ ID NO: 45553 - DNA, 15 bp, Homo sapiens
aaaattaaaatattt

SEQ ID NO: 45554 - DNA, 15 bp, Homo sapiens
aaattaaaatatttt

SEQ ID NO: 45555 - DNA, 15 bp, Homo sapiens
aattaaaatattttt

SEQ ID NO: 45556 - DNA, 15 bp, Homo sapiens
attaaaatatttttt

SEQ ID NO: 45557 - DNA, 15 bp, Homo sapiens
ttaaaatatttttta

SEQ ID NO: 45558 - DNA, 15 bp, Homo sapiens
taaaatattttttaa

SEQ ID NO: 45559 - DNA, 15 bp, Homo sapiens
aaaatattttttaaa

SEQ ID NO: 45560 - DNA, 15 bp, Homo sapiens
aaatattttttaaaa

SEQ ID NO: 45561 - DNA, 15 bp, Homo sapiens
aatattttttaaaag

SEQ ID NO: 45562 - DNA, 15 bp, Homo sapiens
atattttttaaaaga

SEQ ID NO: 45563 - DNA, 15 bp, Homo sapiens
tattttttaaaagaa

SEQ ID NO: 45564 - DNA, 15 bp, Homo sapiens
attttttaaaagaaa

SEQ ID NO: 45565 - DNA, 15 bp, Homo sapiens
ttttttaaaagaaaa

SEQ ID NO: 45566 - DNA, 15 bp, Homo sapiens
tttttaaaagaaaag

SEQ ID NO: 45567 - DNA, 15 bp, Homo sapiens
ttttaaaagaaaagc

SEQ ID NO: 45568 - DNA, 15 bp, Homo sapiens
tttaaaagaaaagca

SEQ ID NO: 45569 - DNA, 15 bp, Homo sapiens
ttaaaagaaaagcac

SEQ ID NO: 45570 - DNA, 15 bp, Homo sapiens
taaaagaaaagcact

SEQ ID NO: 45571 - DNA, 15 bp, Homo sapiens
aaaagaaaagcactt

SEQ ID NO: 45572 - DNA, 15 bp, Homo sapiens
aaagaaaagcacttt

SEQ ID NO: 45573 - DNA, 15 bp, Homo sapiens
aagaaaagcacttta

SEQ ID NO: 45574 - DNA, 15 bp, Homo sapiens
agaaaagcactttat

SEQ ID NO: 45575 - DNA, 15 bp, Homo sapiens
gaaaagcactttatt

SEQ ID NO: 45576 - DNA, 15 bp, Homo sapiens
aaaagcactttattt

SEQ ID NO: 45577 - DNA, 15 bp, Homo sapiens
aaagcactttattta

SEQ ID NO: 45578 - DNA, 15 bp, Homo sapiens
aagcactttatttat

SEQ ID NO: 45579 - DNA, 15 bp, Homo sapiens
agcactttatttatt

SEQ ID NO: 45580 - DNA, 15 bp, Homo sapiens
gcactttatttattc

SEQ ID NO: 45581 - DNA, 15 bp, Homo sapiens
cactttatttattct

SEQ ID NO: 45582 - DNA, 15 bp, Homo sapiens
actttatttattctg

SEQ ID NO: 45583 - DNA, 15 bp, Homo sapiens
ctttatttattctgt

SEQ ID NO: 45584 - DNA, 15 bp, Homo sapiens
tttatttattctgtc

SEQ ID NO: 45585 - DNA, 15 bp, Homo sapiens
ttatttattctgtca

SEQ ID NO: 45586 - DNA, 15 bp, Homo sapiens
tatttattctgtcac

SEQ ID NO: 45587 - DNA, 15 bp, Homo sapiens
atttattctgtcaca

SEQ ID NO: 45588 - DNA, 15 bp, Homo sapiens
tttattctgtcacag

SEQ ID NO: 45589 - DNA, 15 bp, Homo sapiens
ttattctgtcacaga

SEQ ID NO: 45590 - DNA, 15 bp, Homo sapiens
tattctgtcacagag

SEQ ID NO: 45591 - DNA, 15 bp, Homo sapiens
attctgtcacagaga

SEQ ID NO: 45592 - DNA, 15 bp, Homo sapiens
ttctgtcacagagac

SEQ ID NO: 45593 - DNA, 15 bp, Homo sapiens
tctgtcacagagaca

SEQ ID NO: 45594 - DNA, 15 bp, Homo sapiens
ctgtcacagagacat

SEQ ID NO: 45595 - DNA, 15 bp, Homo sapiens
tgtcacagagacatt

SEQ ID NO: 45596 - DNA, 15 bp, Homo sapiens
gtcacagagacattg

SEQ ID NO: 45597 - DNA, 15 bp, Homo sapiens
tcacagagacattgt

SEQ ID NO: 45598 - DNA, 15 bp, Homo sapiens
cacagagacattgtt

SEQ ID NO: 45599 - DNA, 15 bp, Homo sapiens
acagagacattgttg

SEQ ID NO: 45600 - DNA, 15 bp, Homo sapiens
cagagacattgttgg

SEQ ID NO: 45601 - DNA, 15 bp, Homo sapiens
agagacattgttgga

SEQ ID NO: 45602 - DNA, 15 bp, Homo sapiens
gagacattgttggaa

SEQ ID NO: 45603 - DNA, 15 bp, Homo sapiens
agacattgttggaat

SEQ ID NO: 45604 - DNA, 15 bp, Homo sapiens
gacattgttggaatt

SEQ ID NO: 45605 - DNA, 15 bp, Homo sapiens
acattgttggaattg

SEQ ID NO: 45606 - DNA, 15 bp, Homo sapiens
cattgttggaattgc

SEQ ID NO: 45607 - DNA, 15 bp, Homo sapiens
attgttggaattgct

SEQ ID NO: 45608 - DNA, 15 bp, Homo sapiens
ttgttggaattgctc

SEQ ID NO: 45609 - DNA, 15 bp, Homo sapiens
tgttggaattgctct

SEQ ID NO: 45610 - DNA, 15 bp, Homo sapiens
gttggaattgctctt

SEQ ID NO: 45611 - DNA, 15 bp, Homo sapiens
ttggaattgctctta

SEQ ID NO: 45612 - DNA, 15 bp, Homo sapiens
tggaattgctcttag

SEQ ID NO: 45613 - DNA, 15 bp, Homo sapiens
ggaattgctcttagc

SEQ ID NO: 45614 - DNA, 15 bp, Homo sapiens
gaattgctcttagca

SEQ ID NO: 45615 - DNA, 15 bp, Homo sapiens
aattgctcttagcag

SEQ ID NO: 45616 - DNA, 15 bp, Homo sapiens
attgctcttagcaga

SEQ ID NO: 45617 - DNA, 15 bp, Homo sapiens
ttgctcttagcagag

SEQ ID NO: 45618 - DNA, 15 bp, Homo sapiens
tgctcttagcagagg

SEQ ID NO: 45619 - DNA, 15 bp, Homo sapiens
gctcttagcagaggc

SEQ ID NO: 45620 - DNA, 15 bp, Homo sapiens
ctcttagcagaggca

SEQ ID NO: 45621 - DNA, 15 bp, Homo sapiens
tcttagcagaggcag

SEQ ID NO: 45622 - DNA, 15 bp, Homo sapiens
cttagcagaggcagg

SEQ ID NO: 45623 - DNA, 15 bp, Homo sapiens
ttagcagaggcagga

SEQ ID NO: 45624 - DNA, 15 bp, Homo sapiens
tagcagaggcaggat

SEQ ID NO: 45625 - DNA, 15 bp, Homo sapiens
agcagaggcaggata

SEQ ID NO: 45626 - DNA, 15 bp, Homo sapiens
gcagaggcaggatat

SEQ ID NO: 45627 - DNA, 15 bp, Homo sapiens
cagaggcaggatatg

SEQ ID NO: 45628 - DNA, 15 bp, Homo sapiens
agaggcaggatatgt

SEQ ID NO: 45629 - DNA, 15 bp, Homo sapiens
gaggcaggatatgtg

SEQ ID NO: 45630 - DNA, 15 bp, Homo sapiens
aggcaggatatgtgg

SEQ ID NO: 45631 - DNA, 15 bp, Homo sapiens
ggcaggatatgtggt

SEQ ID NO: 45632 - DNA, 15 bp, Homo sapiens
gcaggatatgtggtt

SEQ ID NO: 45633 - DNA, 15 bp, Homo sapiens
caggatatgtggttc

SEQ ID NO: 45634 - DNA, 15 bp, Homo sapiens
aggatatgtggttcc

SEQ ID NO: 45635 - DNA, 15 bp, Homo sapiens
ggatatgtggttccc

SEQ ID NO: 45636 - DNA, 15 bp, Homo sapiens
gatatgtggttccca

SEQ ID NO: 45637 - DNA, 15 bp, Homo sapiens
atatgtggttcccac

SEQ ID NO: 45638 - DNA, 15 bp, Homo sapiens
tatgtggttcccaca

SEQ ID NO: 45639 - DNA, 15 bp, Homo sapiens
atgtggttcccacag

SEQ ID NO: 45640 - DNA, 15 bp, Homo sapiens
tgtggttcccacaga

SEQ ID NO: 45641 - DNA, 15 bp, Homo sapiens
gtggttcccacagag

SEQ ID NO: 45642 - DNA, 15 bp, Homo sapiens
tggttcccacagagg

SEQ ID NO: 45643 - DNA, 15 bp, Homo sapiens
ggttcccacagaggt

SEQ ID NO: 45644 - DNA, 15 bp, Homo sapiens
gttcccacagaggta

SEQ ID NO: 45645 - DNA, 15 bp, Homo sapiens
ttcccacagaggtaa

SEQ ID NO: 45646 - DNA, 15 bp, Homo sapiens
tcccacagaggtaat

SEQ ID NO: 45647 - DNA, 15 bp, Homo sapiens
cccacagaggtaata

SEQ ID NO: 45648 - DNA, 15 bp, Homo sapiens
ccacagaggtaatat

SEQ ID NO: 45649 - DNA, 15 bp, Homo sapiens
cacagaggtaatata

SEQ ID NO: 45650 - DNA, 15 bp, Homo sapiens
acagaggtaatatag

SEQ ID NO: 45651 - DNA, 15 bp, Homo sapiens
cagaggtaatatagc

SEQ ID NO: 45652 - DNA, 15 bp, Homo sapiens
agaggtaatatagca

SEQ ID NO: 45653 - DNA, 15 bp, Homo sapiens
gaggtaatatagcag

SEQ ID NO: 45654 - DNA, 15 bp, Homo sapiens
aggtaatatagcaga

SEQ ID NO: 45655 - DNA, 15 bp, Homo sapiens
ggtaatatagcagac

SEQ ID NO: 45656 - DNA, 15 bp, Homo sapiens
gtaatatagcagaca

SEQ ID NO: 45657 - DNA, 15 bp, Homo sapiens
taatatagcagacac

SEQ ID NO: 45658 - DNA, 15 bp, Homo sapiens
aatatagcagacact

SEQ ID NO: 45659 - DNA, 15 bp, Homo sapiens
atatagcagacactc

SEQ ID NO: 45660 - DNA, 15 bp, Homo sapiens
tatagcagacactct

SEQ ID NO: 45661 - DNA, 15 bp, Homo sapiens
atagcagacactctt

SEQ ID NO: 45662 - DNA, 15 bp, Homo sapiens
tagcagacactcttt

SEQ ID NO: 45663 - DNA, 15 bp, Homo sapiens
agcagacactctttt

SEQ ID NO: 45664 - DNA, 15 bp, Homo sapiens
gcagacactcttttg

SEQ ID NO: 45665 - DNA, 15 bp, Homo sapiens
cagacactcttttgg

SEQ ID NO: 45666 - DNA, 15 bp, Homo sapiens
agacactcttttggg

SEQ ID NO: 45667 - DNA, 15 bp, Homo sapiens
gacactcttttgggt

SEQ ID NO: 45668 - DNA, 15 bp, Homo sapiens
acactcttttgggta

SEQ ID NO: 45669 - DNA, 15 bp, Homo sapiens
cactcttttgggtaa

SEQ ID NO: 45670 - DNA, 15 bp, Homo sapiens
actcttttgggtaac

SEQ ID NO: 45671 - DNA, 15 bp, Homo sapiens
ctcttttgggtaacc

SEQ ID NO: 45672 - DNA, 15 bp, Homo sapiens
tcttttgggtaacca

SEQ ID NO: 45673 - DNA, 15 bp, Homo sapiens
cttttgggtaaccag

SEQ ID NO: 45674 - DNA, 15 bp, Homo sapiens
ttttgggtaaccagc

SEQ ID NO: 45675 - DNA, 15 bp, Homo sapiens
tttgggtaaccagca

SEQ ID NO: 45676 - DNA, 15 bp, Homo sapiens
ttgggtaaccagcat

SEQ ID NO: 45677 - DNA, 15 bp, Homo sapiens
tgggtaaccagcatg

SEQ ID NO: 45678 - DNA, 15 bp, Homo sapiens
gggtaaccagcatgc

SEQ ID NO: 45679 - DNA, 15 bp, Homo sapiens
ggtaaccagcatgcc

SEQ ID NO: 45680 - DNA, 15 bp, Homo sapiens
gtaaccagcatgcct

SEQ ID NO: 45681 - DNA, 15 bp, Homo sapiens
taaccagcatgcctt

SEQ ID NO: 45682 - DNA, 15 bp, Homo sapiens
aaccagcatgccttt

SEQ ID NO: 45683 - DNA, 15 bp, Homo sapiens
accagcatgcctttc

SEQ ID NO: 45684 - DNA, 15 bp, Homo sapiens
ccagcatgcctttct

SEQ ID NO: 45685 - DNA, 15 bp, Homo sapiens
cagcatgcctttctt

SEQ ID NO: 45686 - DNA, 15 bp, Homo sapiens
agcatgcctttcttt

SEQ ID NO: 45687 - DNA, 15 bp, Homo sapiens
gcatgcctttctttg

SEQ ID NO: 45688 - DNA, 15 bp, Homo sapiens
catgcctttctttgg

SEQ ID NO: 45689 - DNA, 15 bp, Homo sapiens
atgcctttctttggg

SEQ ID NO: 45690 - DNA, 15 bp, Homo sapiens
tgcctttctttgggt

SEQ ID NO: 45691 - DNA, 15 bp, Homo sapiens
gcctttctttgggta

SEQ ID NO: 45692 - DNA, 15 bp, Homo sapiens
cctttctttgggtaa

SEQ ID NO: 45693 - DNA, 15 bp, Homo sapiens
ctttctttgggtaat

SEQ ID NO: 45694 - DNA, 15 bp, Homo sapiens
tttctttgggtaatc

SEQ ID NO: 45695 - DNA, 15 bp, Homo sapiens
ttctttgggtaatca

SEQ ID NO: 45696 - DNA, 15 bp, Homo sapiens
tctttgggtaatcat

SEQ ID NO: 45697 - DNA, 15 bp, Homo sapiens
ctttgggtaatcatc

SEQ ID NO: 45698 - DNA, 15 bp, Homo sapiens
tttgggtaatcatcc

SEQ ID NO: 45699 - DNA, 15 bp, Homo sapiens
ttgggtaatcatcct

SEQ ID NO: 45700 - DNA, 15 bp, Homo sapiens
tgggtaatcatcctt

SEQ ID NO: 45701 - DNA, 15 bp, Homo sapiens
gggtaatcatcctta

SEQ ID NO: 45702 - DNA, 15 bp, Homo sapiens
ggtaatcatccttat

SEQ ID NO: 45703 - DNA, 15 bp, Homo sapiens
gtaatcatccttatc

SEQ ID NO: 45704 - DNA, 15 bp, Homo sapiens
taatcatccttatcc

SEQ ID NO: 45705 - DNA, 15 bp, Homo sapiens
aatcatccttatccc

SEQ ID NO: 45706 - DNA, 15 bp, Homo sapiens
atcatccttatccca

SEQ ID NO: 45707 - DNA, 15 bp, Homo sapiens
tcatccttatcccaa

SEQ ID NO: 45708 - DNA, 15 bp, Homo sapiens
catccttatcccaac

SEQ ID NO: 45709 - DNA, 15 bp, Homo sapiens
atccttatcccaact

SEQ ID NO: 45710 - DNA, 15 bp, Homo sapiens
tccttatcccaactc

SEQ ID NO: 45711 - DNA, 15 bp, Homo sapiens
ccttatcccaactcc

SEQ ID NO: 45712 - DNA, 15 bp, Homo sapiens
cttatcccaactcca

SEQ ID NO: 45713 - DNA, 15 bp, Homo sapiens
ttatcccaactccac

SEQ ID NO: 45714 - DNA, 17 bp, Homo sapiens
gacacgaaatcacgcat

SEQ ID NO: 45715 - DNA, 17 bp, Homo sapiens
cgacacgaaatcacgca

SEQ ID NO: 45716 - DNA, 17 bp, Homo sapiens
gattttacacgcttccg

SEQ ID NO: 45717 - DNA, 17 bp, Homo sapiens
ctttcgatgccgacata
